United States Patent Application Publication US 2023/0390346 A1 - sequence listing, part 9

SEQ ID NO: 12 - DNA, 1000000 bp, Bacillus subtilis
atggaaaatatattagacctgtggaaccaagcccttgctcaaatcgaaaaaaagttgagcaaaccgagttttgagacttggatgaagtcaaccaaagcccactcactgcaaggcgatacattaacaatcacggctcccaatgaatttgccagagactggctggagtccagatacttgcatctgattgcagatactatatatgaattaaccggggaagaattgagcattaagtttgtcattcctcaaaatcaagatgttgaggactttatgccgaaaccgcaagtcaaaaaagcggtcaaagaagatacatctgattttcctcaaaatatgctcaatccaaaatatacttttgatacttttgtcatcggatctggaaaccgatttgcacacgctgcttccctcgcagtagcggaagcacccgcgaaagcttacaaccctttatttatctatgggggcgtcggcttagggaaaacgcacttaatgcatgcgatcggccattatgtaatagatcataatccttctgccaaagtggtttatctgtcttctgagaaatttacaaacgaattcatcaactctatccgagataataaagccgtcgacttccgcaatcgctatcgaaatgttgatgtgcttttgatagatgatattcaatttttagcggggaaagaacaaacccaggaagaatttttccatacatttaacacattgcacgaagaaagcaaacaaatcgtcatttcaagtgatcgaccgccaaaggaaattccgacacttgaggacagattgcgctcacgttttgaatggggacttattacagatatcacaccgcctgatctagaaacgagaattgcgattttaagaaaaaaagccaaagcagaaggcctcgatattccgaacgaggttatgctttacatcgcgaatcaaatcgacagcaatattcgggaactcgaaggagcattaatcagagttgtcgcttattcatctttaattaataaagatattaatgctgatctggccgctgaggcgttgaaagatattattccttcctcaaaaccgaaagtcattacgataaaagaaattcagagggtagtaggccagcaatttaatattaaactcgaggatttcaaagcaaaaaaacggacaaagtcagtagcttttccgcgtcaaatcgccatgtacttatcaagggaaatgactgattcctctcttcctaaaatcggtgaagagtttggaggacgtgatcatacgaccgttattcatgcgcatgaaaaaatttcaaaactgctggcagatgatgaacagcttcagcagcatgtaaaagaaattaaagaacagcttaaatagcaggaccggggatcaatcggggaaagtgtgaataacttttcggaagtcatacacagtctgtccacatgtggataggctgtgtttcctgtctttttcacaacttatccacaaatccacaggccctactattacttctactattttttataaatatatatattaatacattatccgttaggaggataaaaatgaaattcacgattcaaaaagatcgtcttgttgaaagtgtccaagatgtattaaaagcagtttcatccagaaccacgattcccattctgactggtattaaaattgttgcatcagatgatggagtatcctttacagggagtgactcagatatttctattgaatccttcattccaaaagaagaaggagataaagaaattgtcactattgaacagcccggaagcatcgttttacaggctcgcttttttagtgaaattgtaaaaaaattgccgatggcaactgtagaaatcgaagtccaaaatcagtatttgacgattatccgttctggtaaagctgaatttaatctaaacggactggatgctgatgagtatccgcacttgcctcagattgaagagcatcatgcgattcagatcccaactgatttgttaaaaaatctaatcagacaaacagtatttgcagtgtccacctcagaaacacgccctatcttgacaggtgtaaactggaaagtggagcaaagtgaattattatgcactgcaacggatagccaccgtcttgcattaagaaaggcaaaacttgatattccagaagacagatcttataacgtcgtgattccgggaaaaagtttaactgaactcagcaagattttagatgacaaccaagaacttgtagatatcgtcatcacagaaacccaagttctgtttaaagcgaaaaacgtcttattcttctcacggcttctggacgggaattatccagacacaaccagcctgattccgcaagacagcaaaacagaaatcattgtgaacacaaaagaattccttcaggccattgatcgtgcatctcttttagctagagagggacgcaacaacgttgtaaaactgtccgcaaaaccggctgaatccattgaaatttcttccaactccccggaaatcggtaaagttgtggaagcaattgctgcggatcaaattgaaggtgaggaattaaatatctcttttagtccaaaatatatgctggatgcactaaaggtgcttgaaggagcagaaatacgcgtaagctttacaggcgcaatgagacctttcttaattcgcacgccgaatgatgaaacgattgtacagcttatcctccctgtcagaacctattaatccgatacactgctgccgacccgtcggcagcttttctattcggtatctgctccgacaagttttccctttccctaattcgtttttttttagtacaattagatattagtgatatttgaaagaggtcgatataatggcaaatccgatttcaattgatacagagatgattacactcggacaattcttaaaattagccgatgtgattcagtctggcggtatggcgaagtggtttttaagcgagcatgaagtgcttgtgaacgatgagccggacaaccgccggggcagaaaactgtatgttggagatgtggtagagattgaaggatttggttcatttcaagtcgtcaattaaagcgggtgacactgattgtatatccagaacttagaactgacatcttaccgcaactacgaccatgctgaacttcaatttgaaaataaagtaaatgtgatcatcggagaaaacgcccaggggaagacaaacctcatggaggcgatctatgtcttgtccatggcgaaatcgcaccggacatcaaatgacaaagaacttatacggtgggacaaagactatgctaaaatagagggaagagtgatgaagcaaaacggggcgatcccgatgcagctcgtcatctccaaaaagggtaaaaagggcaaggtcaatcatattgaacagcaaaagctcagccagtatgtcggagccctcaacaccattatgttcgcgccggaagatttaaatcttgtaaagggaagccctcaagtgagaaggcggtttcttgacatggaaatcggacaggtttctctcgtctaccttcatgatctttctctttaccagaaaatcctttcccagcggaatcattttttgaaacagctgcaaacaagaaaacaaactgaccggacgatgctcgatgttctgaccgatcagcttgtagaagttgcagcaaaagtcgtcgtaaaacgcctgcagtttacagcacagctcgagaaatgggcgcagcccatccatgcaggcatctcaagagggcttgaagaactgaccctgaaataccatacagctcttgaggtatcagatcccctagatttgtcgaaaataggagatagctatcaagaagcgttttctaaattaagagaaaaagaaattgagcgtggtgtgacgctgtcagggcctcatcgcgatgatgttcttttctatgtgaacggacgcgatgtgcagacgtatggttctcaaggacagcagcgaacgacggcgttgtcccttaagctggcggagattgacctgatccatgaagaaatcggagaatatcccattttactattggatgatgtactgagtgaactggatgattatcgccagtcacacttgcttcatacgatccaaggccgtgtacaaacgtttgtcacaacgacaagcgttgatggcattgatcacgaaaccttacgtcaagcaggaatgttccgtgtgcaaaatggtgcgttagtgaagtgaagaaatgaggtgagcaattgtatattcatttaggtgatgactttgtggtttcaacacgagatattgtcggcatttttgactttaaagccaacatgtcgcctattgttgaagaatttctgaaaaaacagaaacacaaggtggtgcctttcgtaaacggcacgcccaaatctatcgtagtcacggttcagaatatatattactctcccttatcttccagcacattaaaaaaacgtgcgcaatttatgtttgaaatagattcttagaaattttttatcacgaatatatcgtttagaaaagtgtaggtgaatgacgtggctatggaacagcagcaaaacagttatgatgaaaatcagatacaggtactagaaggattggaagctgttcgtaaaagaccggggatgtatatcggttcgacaaacagcaaaggccttcaccacctggtatgggaaattgtcgacaatagtattgacgaagccctcgccggttattgtacggatatcaatatccaaatcgaaaaagacaacagtatcacggttgtagataatggccgcggtattccagtcggtattcatgaaaaaatgggccgtcctgcggtagaagtcattatgacggtacttcatgccggaggaaaatttgacggaagcggctataaagtatccggaggattacacggtgtaggtgcgtctgtcgtaaacgcactatcaacagagcttgatgtgacggttcaccgtgacggtaaaattcaccgccaaacttataaacgcggagttccggttacagaccttgaaatcattggcgaaacggatcatacaggaacgacgacacattttgtcccggaccctgaaattttctcagaaacaaccgagtatgattatgatctgcttgccaaccgcgtacgtgaattagcctttttaacaaagggcgtaaacatcacgattgaggataaacgtgaaggacaagagcgcaaaaatgaataccattacgaaggcggaattaaaagttatgtagagtatttaaaccgctctaaagaggttgtccatgaagagccgatttacattgaaggcgaaaaggacggcattacggttgaagtggctttgcaatacaatgacagctacacaagcaacatttactcgtttacaaacaacattaacacgtacgaaggcggtacccatgaagctggcttcaaaacgggcctgactcgtgttatcaacgattacgccagaaaaaaagggcttattaaagaaaatgatccaaacctaagcggagatgacgtaagggaagggctgacagcgattatttcaatcaaacaccctgatccgcagtttgagggccaaacgaaaacaaagctgggcaactcagaagcacggacgatcaccgatacgttattttctacggcgatggaaacatttatgctggaaaatccagatgcagccaaaaaaattgtcgataaaggcttaatggcggcaagagcaagaatggctgcgaaaaaagcccgtgaactaacacgtcgtaagagtgctttggaaatttcaaacctgcccggtaagttagcggactgctcttcaaaagatccgagcatctccgagttatatatcgtagagggtgactctgccggaggatctgctaaacaaggacgcgacagacatttccaagccattttgccgcttagaggtaaaatcctaaacgttgaaaaggccagactggataaaatcctttctaacaacgaagttcgctctatgatcacagcgctcggcacaggtattggggaagacttcaaccttgagaaagcccgttaccacaaagttgtcattatgacagatgccgatgttgacggcgcgcacatcagaacactgctgttaacgttcttttacagatatatgcgccaaattatcgaaaatggctacgtgtacattgcgcagccgccgctctacaaggttcaacaggggaaacgcgttgaatatgcgtacaatgacaaggagctggaagagctgttaaaaactcttcctcaaacgcctaagcctggactgcagcgttacaaaggtcttggtgaaatgaatgccacccagctatgggagacaaccatggatcctagttccagaacacttcttcaggtaactcttgaagatgcaatggatgcggacgagacttttgaaatgcttatgggcgacaaggtagaaccgcgccgaaacttcatagaagcgaatgcgagatacgttaaaaatcttgacatctaatcataaaaagccttatttccaataagaaataaggcttttttctgaacaagatcagatgcagcaatgcttgcagtacctatatattctagcaatttaatgtgtataatcataagtttattgatataatggagaatagtgaaatcgtattgaaggtcataatggacaatctactcccacatatttcatgtgatacttcagggaggttttttaatgagtgaacaaaacacaccacaagttcgtgaaataaatatcagtcaggaaatgcgtacgtccttcttggattatgcaatgagcgttatcgtgtcccgtgctcttccagatgttcgagacggtttaaaaccggttcatagacggattttgtatgcaatgaatgatttaggcatgacaagtgacaagccttataaaaaatccgcgcgtatcgttggagaagttatcgggaaataccacccgcacggtgattcagcggtatatgaatccatggtcagaatggctcaggatttcaactaccgttatatgctcgttgacggtcacggaaacttcggttctgttgacggagactcagcggcggccatgcgttatacagaagcaagaatgtctaaaatctcaatggagattcttcgcgacatcacaaaagacacaatcgattaccaggataactatgacgggtcagaaagagaacctgtcgttatgccttcaaggttcccgaatctgctcgtgaacggtgctgccggcattgcggtaggtatggcaacaaacattcctccgcaccagctgggagaaatcattgacggtgtacttgctgtcagtgagaatccggacattacaattccagagcttatggaagtcattccagggcctgatttcccgaccgcgggtcaaatcttgggacgcagcggtatccggaaagcatacgaatcaggccgaggctctatcacgatccgggcaaaagctgagatcgaacaaacatcttcgggtaaagaaagaattatcgttacagagttaccttaccaagtaaataaggctaaattaattgagaaaattgcagatctcgtaagggacaaaaagatagagggtatcacagatctgcgtgatgagtcagatcgtacaggtatgagaattgtcattgaaatcagacgcgacgccaatgcaaatgtcatcttaaacaatctgtacaaacaaactgctctacaaacatcttttggcatcaacctgcttgcacttgttgatggccagccgaaagttttaactcttaagcaatgcctggagcattacctcgaccatcaaaaagttgtcattagacgccgtactgcttatgaattgcgtaaagcggaagcgagagctcatatcctggaaggattgagagttgcactggatcatctcgatgcagttatctcccttatccgtaattctcaaacggctgaaattgcgagaacaggtttaattgaacaattctcactgacagagaagcaagcacaagcgatccttgatatgaggctccagcgtttaacgggactggaacgtgaaaagatagaagaagaataccaatctcttgttaaattaattgcagagctaaaagacatcttggcaaatgaatataaagtgcttgagatcattcgtgaagaactcacggaaatcaaagagcgttttaacgatgaaagacgtactgagatcgtcacttctggactggagactattgaagatgaagatctcatcgagagagaaaatatcgtagttactctgacgcacaacggatacgtcaaacgtcttcctgcatcaacttaccgcagtcaaaaacgaggcggaaaaggtgtacaaggtatgggaacaaacgaagatgatttcgttgagcatttgatctctacgtcaactcatgacacgattctcttcttctcgaacaaggggaaagtgtatcgtgcaaaagggtatgaaatccctgaatacggcagaacggcaaaaggaatcccgattattaacctgctggaggtagaaaagggtgagtggatcaacgcgattattccagtcacggaattcaatgcggagctttaccttttcttcactacaaagcatggggtttcaaaacgaacatcgctatctcaattcgctaatatccgcaacaatggtctaatcgctctgggtcttcgtgaagatgatgaactgatgggtgtacgtctgactgacggcacaaaacaaatcatcattggaacgaaaaacggtttactgatccgtttccctgaaacagatgtccgggagatgggaagaactgcggcgggcgtaaaaggcatcaccctgacggatgacgacgttgttgtcggcatggagatattagaggaagaatcacacgtccttatcgtaactgaaaaagggtacggaaaacgaactccggctgaagagtacagaacccaaagccggggcggaaaaggactcaaaacagcgaaaatcaccgagaacaacggccaactagtagcagtgaaagctactaaaggtgaagaggatctaatgattattacagctagcggcgtactcatcagaatggacatcaatgatatctccatcaccggacgtgtcactcaaggtgtgcgtctcatcagaatggcagaagaagagcatgttgctacagtagctttagtagagaaaaacgaagaagatgagaatgaagaagaacaagaagaagtgtgagaaaaagcgcagctgaaatagctgcgcttttttgtgtcataaccctttacagtcataaaaattatggtataatcatttttgttgtctttttaaagacacaagcatgaccattatgactagtaaaaacttttttaaaaaagtattgacctagttaactaaaaatgttactattaagtagtcgcttcgagagaagcacacaaagttctttgaaaactaaacaagacaaaacgtacctgttaattcatttttaaaaatcgcacagcgatgtgcgtagtcagtcaaactagggcctgcacgacgcaggtcacacaggtgtcgccgcaggatgcggtgaacttaacctgtgatccatttatcggagagtttgatcctggctcaggacgaacgctggcggcgtgcctaatacatgcaagtcgagcggacagatgggagcttgctccctgatgttagcggcggacgggtgagtaacacgtgggtaacctgcctgtaagactgggataactccgggaaaccggggctaataccggatggttgtttgaaccgcatggttcaaacataaaaggtggcttcggctaccacttacagatggacccgcggcgcattagctagttggtgaggtaacggctcaccaaggcaacgatgcgtagccgacctgagagggtgatcggccacactgggactgaggcacggcccagactcctacgggaggcagcagtagggaatcttccgcaatggacgaaagtctgacggagcaacgccgcgtgagtgatgaaggttttcggatcgtaaagctctgttgttagggaagaacaagtaccgttcgaatagggcggtaccttgacggtacctaaccagaaagccacggctaactacgtgccagcagccgcggtaatacgtaggtggcaagcgttgtccggaattattgggcgtaaagggctcgcaggcggtttcttaagtctgatgtgaaagcccccggctcaaccggggagggtcattggaaactggggaacttgagtgcagaagaggagagtggaattccacgtgtagcggtgaaatgcgtagagatgtggaggaacaccagtggcgaaggcgactctctggtctgtaactgacgctgaggagcgaaagcgtggggagcgaacaggattagataccctggtagtccacgccgtaaacgatgagtgctaagtgttagggggtttccgccccttagtgctgcagctaacgcattaagcactccgcctggggagtacggtcgcaagactgaaactcaaaggaattgacgggggcccgcacaagcggtggagcatgtggtttaattcgaagcaacgcgaagaaccttaccaggtcttgacatcctctgacaatcctagagataggacgtccccttcgggggcagagtgacaggtggtgcatggttgtcgtcagctcgtgtcgtgagatgttgggttaagtcccgcaacgagcgcaacccttgatcttagttgccagcattcagttgggcactctaaggtgactgccggtgacaaaccggaggaaggtggggatgacgtcaaatcatcatgccccttatgacctgggctacacacgtgctacaatggacagaacaaagggcagcgaaaccgcgaggttaagccaatcccacaaatctgttctcagttcggatcgcagtctgcaactcgactgcgtgaagctggaatcgctagtaatcgcggatcagcatgccgcggtgaatacgttcccgggccttgtacacaccgcccgtcacaccacgagagtttgtaacacccgaagtcggtgaggtaaccttttaggagccagccgccgaaggtgggacagatgattggggtgaagtcgtaacaaggtagccgtatcggaaggtgcggctggatcacctcctttctaaggatattatacggaatataagaccttgggtcttataaacagaacgttccctgtcttgtttagttttgaaggaactttgttccttgaataagttaagatgggcctgtagctcagctggttagagcgcacgcctgataagcgtgaggtcggtggttcgagtccactcaggcccaccatcttatataacggggccttagctcagctgggagagcgcctgctttgcacgcaggaggtcagcggttcgatcccgctaggctccaccaacgtgttctttgaaaactagataacagtagacatcacattcaattagtaatacaagatatcacatagtgattctttttaacggttaagttagaaagggcgcacggtggatgccttggcactaggagccgatgaaggacgggacgaacaccgatatgcttcggggagctgtaagcaagctttgatccggagatttccgaatggggaaacccaccactcgtaatggagtggtatccatatctgaattcataggatatgagaaggcagacccggggaactgaaacatctaagtacccggaggaagagaaagcaaatgcgattccctgagtagcggcgagcgaaacgggattagcccaaaccaagaggcttgcctcttggggttgtaggacactctgtacggagttacaaaggaacgaggtagatgaagaggtctggaaaggcccgccataggaggtaacagccctgtagtcaaaacttcgttctctcctgagtggatcctgagtacggcggaacacgtgaaattccgtcggaatccgggaggaccatctcccaaggctaaatactccctagtgaccgatagtgaaccagtaccgtgagggaaaggtgaaaagcaccccggaaggggagtgaaagagatcctgaaaccgtgtgcctacaagtagtcagagcccgttaacgggtgatggcgtgccttttgtagaatgaaccggcgagttacgatcccgtgcaaggttaagcagaagatgcggagccgcagcgaaagcgagtctgaatagggcgcatgagtacgtggtcgtagacccgaaaccaggtgatctacccatgtccagggtgaagttcaggtaacactgaatggaggcccgaacccacgcacgttgaaaagtgcggggatgaggtgtgggtaggggtgaaatgccaatcgaacctggagatagctggttctctccgaaatagctttagggctagcctcaaggtaagagtcttggaggtagagcactgattggactaggggcccctaccgggttaccgaattcagtcaaactccgaatgccaatgacttatccttgggagtcagactgcgagtgataagatccgtagtcgaaagggaaacagcccagaccgccagctaaggtcccaaagtatacgttaagtggaaaaggatgtggagttgcttagacaaccaggatgttggcttagaagcagccaccatttaaagagtgcgtaatagctcactggtcgagtgactctgcgccgaaaatgtaccggggctaaacgtatcaccgaagctgcggactgttcttcgaacagtggtaggagagcgttctaagggctgtgaagccagaccggaaggactggtggagcgcttagaagtgagaatgccggtatgagtagcgaaagaggggtgagaatcccctccaccgaatgcctaaggtttcctgaggaaggctcgtccgctcagggttagtcgggacctaagccgaggccgaaaggcgtaggcgatggacaacaggttgatattcctgtaccacctcctcaccatttgagcaatggggggacgcaggaggatagggtaagcgcggtattggatatccgcgtccaagcagttaggctgggaaataggcaaatccgtttcccataaggctgagctgtgatggcgagcgaaatatagtagcgaagttcctgattccacactgccaagaaaagcctctagcgaggtgagaggtgcccgtaccgcaaaccgacacaggtaggcgaggagagaatcctaaggtgatcgagagaactctcgttaaggaactcggcaaaatgaccccgtaacttcgggagaaggggtgctctgttagggtgcaagcccgagagagccgcagtgaataggcccaggcgactgtttagcaaaaacacaggtctctgcgaagccgtaaggcgaagtataggggctgacgcctgcccggtgctggaaggttaagaggagcgcttagcgtaagcgaaggtgcgaattgaagccccagtaaacggcggccgtaactataacggtcctaaggtagcgaaattccttgtcgggtaagttccgacccgcacgaaaggcgcaacgatctgggcactgtctcaacgagagactcggtgaaattatagtacctgtgaagatgcaggttacccgcgacaggacggaaagaccccgtggagctttactgcagcctgatattgaatgttggtacagcttgtacaggataggtaggagccttggaaaccggagcgccagcttcggtggaggcatcggtgggatactaccctggctgtattgaccttctaacccgccgcccttatcgggcggggagacagtgtcaggtgggcagtttgactggggcggtcgcctcctaaaaggtaacggaggcgcccaaaggttccctcagaatggttggaaatcattcgcagagtgtaaaggcacaagggagcttgactgcgagacctacaagtcgagcagggacgaaagtcgggcttagtgatccggtggttccgcatggaagggccatcgctcaacggataaaagctaccccggggataacaggcttatctcccccaagagtccacatcgacggggaggtttggcacctcgatgtcggctcatcgcatcctggggctgtagtcggtcccaagggttgggctgttcgcccattaaagcggtacgcgagctgggttcagaacgtcgtgagacagttcggtccctatccgtcgcgggcgcaggaaatttgagaggagctgtccttagtacgagaggaccgggatggacgcaccgctggtgtaccagttgttctgccaagggcatcgctgggtagctatgtgcggacgggataagtgctgaaagcatctaagcatgaagcccccctcaagatgagatttcccattccgcaaggaagtaagatccctgaaagatgatcaggttgataggtctgaggtggaagtgtggcgacacatggagctgacagatactaatcgatcgaggacttaaccatatttttgaatgatgtcacacctgttatctagttttgagagaacactctcaatttgtttggtggcgatagcgaagaggtcacacccgttcccataccgaacacggaagttaagctcttcagcgccgatggtagtcgggggtttccccctgtgagagtaggacgccgccaagcaagcttaaacccagctcattgagctgggttttttgtttgttaaaaatgaagaagaaactgtgaagcgtatttagggaatttattttctgatactaataaaaactgctgaattaacacgtagtcatcacttatatgctgtgttaataactcataccaccattctgtttcataccttgcaatcatcccaacgttgtacaaaatcaaataatgaattgtcatttcgggaagcctcagaaattgctccctttgagaagggatataatattggttcttttccatgtcaaacaataagctggtcgatgtccatggctccttgtcttgtggtgaaatttcgaacagcagcccgtgttcatttttttttgtaaaagaccattgataatgatgggacatgtattcagcaaaccttgaatcagacattttgtaattgattactacttcctccggtataaaaatttcgttcttatccttctcaacttttgtcataaatcgttctttctgctgaaagtagaaaatatcgctaagttctggaatggccattaataattttttcatggtataccgttcatctactatatccgattgtccaaataaatgtttcataaaatgtacgcataggccattccgttgtattttcacttcatcgtcgctaaaacaataattttgtttctttcgttttcttgttgttacgccatgtgccagtactgatgtatggcttggataatgaggatcacgtgtaattaagcatgctttgataagctgtgccattccataaaataaaagaatcggtttgatttctaagggagaatatgcagcttgtttataaaacgattcggcatgctttaagaaataaataaaccgttcactgtttttaaaagagttttttttcgcatcgtcaataccgtttaagatataaaccttttctagaaatttctgggttgattcaacggagtaaaatagcgctaagtctttccactcatgatatgtcatgtatatttcttaatcctttccgttatctaaatatttcaactctttcccgcttccttgacatgctcttggctagttgataatctacatataatattttgccgaaaagagggggatttactaatgtgggaaagtaaattttcaaaagaaggcttaacgttcgacgatgtgctgcttgtaccagcaaagtctgaggtacttccgcgtgatgtggatttatctgtagaacttacaaaaacgttaaagctaaatattcctgtcatcagcgcaggtatggacactgtaacagaatcagcaatggcaattgcaatggcaagacagggcggcttgggcatcattcacaaaaatatgtccattgaacagcaggctgaacaagttgataaagtaaagcgttctgagcgcggcgttatcacaaatcccttctttttaactcctgatcaccaagtatttgatgcggagcatttgatggggaaatacagaatttccggtgttccgattgtaaataacgaagaagaccagaagcttgttggaattattacaaaccgtgaccttcgttttatttctgactactcaatgaaaatcagcgacgtcatgacgaaagaagagctagttactgcatctgtaggaactactctggatgaagctgaaaagattttgcagaaacataaaattgaaaagcttcctctcgtagatgaccagaataaattaaaaggtcttatcacaattaaagacattgaaaaagtcattgagttcccgaactcatctaaagacattcacggccgcctgatcgttggcgcggcagttggtgtaactggcgatacaatgactcgcgtcaaaaagcttgttgaagccaatgttgatgtgattgttatcgatacagctcacggacactctcaaggcgttttaaacacagtcacaaaaattcgtgaaacgtatcccgaattaaacattattgctggaaacgtggcaacagctgaagcgacaagagcgcttatcgaagctggagcagacgttgtcaaagttggaataggacctggttcaatttgtactacacgtgttgtagccggcgtcggtgttccgcaaattacagcaatttatgattgtgcgactgaagcaagaaaacacggcaaaacaatcatagccgatggtgggattaaattctctggcgatatcactaaagcgttggcagccggcggacatgctgttatgctcggaagcttgcttgcaggcacatctgaaagccctggtgaaactgaaatctatcaaggcagaagatttaaggtataccgcggcatgggatcagttgctgcaatggaaaaaggaagtaaagaccgttacttccaagaagaaaacaaaaaatttgttcctgaaggaattgaaggacgcacaccttacaaagggccagttgaagaaaccgtttatcagctagtcggaggccttcgttctggtatggggtattgcgggtccaaagatctgcgtgcgctaagagaagaagctcagttcattcgcatgactggcgcaggacttcgcgaaagccatccgcatgacgtacagattacaaaagaatcacctaactatacaatttcataataaattgttacaaattaaaaacatttgacagggtctctgactctgtctattttttttatactgattatgataaaatttatactgttgtgcattgaaaatgtccttaacggcttaattatagatgaagaaaatgaaatacggaggtcgtacgattgaacatcaagaaatgtaaacagctactgatgtcattggttgtgttaactctagctgtcacgtgtctggctccaatgtcaaaagcaaaagcagccagcgatccaattgatatcaatgcatctgctgctattatgatcgaagcttcttcaggtaaaattctttacagtaaaaatgcagataagagactgccaattgcgagtatgacaaaaatgatgacagagtatctgttattagaagcaattgatcaaggtaaagtgaaatgggaccaaacctatacgcctgatgactatgtgtatgaaatttcccaagataacagcttatcaaacgttcctcttcggaaagacgggaaatacacagtaaaagaattatatcaagctacagcaatttattctgcaaatgctgctgctattgcaattgcagaaatcgttgccggttctgaaactaagtttgttgaaaaaatgaatgcaaaagcaaaagaactaggcttaacagattacaaatttgttaacgcaacaggtcttgaaaacaaagatcttcacgggcatcagcctgaggggacaagcgtaaatgaagaaagtgaagtttctgcaaaggatatggcaattcttgcggatcacttgattactgactaccctgagatactggagacttccagtatcgccaaaacgaaattcagagaaggcaccgatgatgaaatggacatgccgaactggaattttatgctgaaggggcttgtcagcgagtataaaaaagcgactgtagacggactgaaaacaggttctactgactctgcgggttcatgctttacaggaacagctgaacgcaacggtatgcgtgtcatcactgttgttttaaacgcgaagggcaaccttcatacaggccgtttcgatgaaacgaaaaaaatgtttgattatgctttcgacaatttctccatgaaagaaatttatgctgaaggcgatcaagtaaaaggccataaaacaatttcagttgataagggtaaagagaaagaagtaggcattgtgacaaacaaggcgttctctcttcctgtcaaaaatggtgaagaaaagaattacaaagcgaaggtcacactgaataaagacaacttaactgctcctgtgaaaaaaggaaccaaggttgggaagctgactgcggaatacacaggtgatgaaaaggattacggattccttaacagcgatctggctggcgtagaccttgttacaaaagaaaatgtagaaaaagcaaactggtttgttttgacaatgcgcagtatcggcggattttttgccggaatttggggaagcattgttgatacggtaaccggctggttttaatcaattgaaagagctctgatggatgttagggctctttcgcgtaatatactgaaaaaacccaatttttaataaaaaatgattttcaaagcgctaaaaaccgaataaaatagtatatatccatatgaattattggatttctaggatacaataaggattagaaatcatataactataccttgattagggggaccaagaaatggctcaaacaggtactgaacgtgtaaaacgcggaatggcagaaatgcaaaaaggcggcgtcatcatggacgtcatcaatgcggaacaagcgaaaatcgctgaagaagctggagctgtcgctgtaatggcgctagaacgtgtgccagcagatattcgcgcggctggaggagttgcccgtatggctgaccctacaatcgtggaagaagtaatgaatgcagtatctatcccggtaatggcaaaagcgcgtatcggacatattgttgaagcgcgtgtgcttgaagctatgggtgttgactatattgatgaaagtgaagttctgacgccggctgacgaagaatttcatttaaataaaaatgaatacacagttccttttgtctgtggctgccgtgatcttggtgaagcaacacgccgtattgcggaaggtgcttctatgcttcgcacaaaaggtgagcctggaacaggtaatattgttgaggctgttcgccatatgcgtaaagttaacgctcaagtgcgcaaagtagttgcgatgagtgaggatgaactaatgacagaagcgaaaaatctaggtgctccttacgagcttcttcttcaaattaaaaaagacggcaagcttcctgtcgttaactttgccgctggcggtgtagcaactccagctgatgctgctctcatgatgcagctcggtgctgacggagtatttgttggttctggtattttcaaatcagacaaccctgctaaatttgcgaaagcaattgtggaagcaacaactcactttactgattacaaattaatcgctgagttgtcaaaagagcttggtactgcaatgaaagggattgaaatctcaaacttacttccagaacagcgtatgcaagaacgcggctggtaagaacataggagcgctgctgacatgttaacaataggtgtactaggacttcaaggagcagttagagagcacatccatgcgattgaagcatgcggcgcggctggtcttgtcgtaaaacgtccggagcagctgaacgaagttgacgggttgattttgccgggcggtgagagcacgacgatgcgccgtttgatcgatacgtatcaattcatggagccgcttcgtgaattcgctgctcagggcaaaccgatgtttggaacatgtgccggattaattatattagcaaaagaaattgccggttcagataatcctcatttaggtcttctgaatgtggttgtagaacgtaattcatttggccggcaggttgacagctttgaagctgatttaacaattaaaggcttggacgagccttttactggggtattcatccgtgctccgcatattttagaagctggtgaaaatgttgaagttctatcggagcataatggtcgtattgtagccgcgaaacaggggcaattccttggctgctcattccatccggagctgacagaagatcaccgagtgacgcagctgtttgttgaaatggttgaggaatataagcaaaaggcacttgtataaaacagttgaaagctgtggaaacttatagtacattataagcacaaataaagatcgaaaagcgttgataggaactagtagggagcctctctttctaagagagccgatggttggtgcgaatcggtgaaagatgctgtctgaatccatccttgagcgaaatgctgaagcgagtaggcatttacgggataaccgttatgtttgaaagtggaaaacgagtctttgatttgttttcaatcagggtggcaacgcgagagctctcgtccctttatggggatgagggctctttttattttcgataaatcaataaaaaaaggagtgtttcgcatgcttgatacgaaaatgctgagagcaaattttcaagaaattaaagcaaagcttgtacacaaaggcgaagacttaactgattttgataagtttgaggcgctggatgatagacgaagagagcttatcggcaaggttgaagagttaaaaggaaaacgaaatgaagtttctcagcaggttgctgtgctgaagcgtgagaaaaaagacgcggatcacattattaaagcaatgcgtgaagtcggcgaggaaattaaaaagctcgatgaagaattacggacagtggaagctgagcttgatacaatcctgctctcaatcccgaatattccgcatgagtctgtacctgtcggtgaaacagaagacgacaacgtagaagtgcgtaaatggggtgaaaagccttcatttgcttatgagccgaagccgcactgggatattgcggatgagctgggtattctggattttgaacgtgctgccaaagtaacaggaagccgtttcgtgttctataaaggcttaggtgctcgtctggagcgtgcgctttataactttatgcttgatctgcatgtggatgagtataactacactgaagtgatcccgccatatatggtaaaccgcgcaagcatgacgggaacggggcagcttcctaaatttgaagaggatgcatttaaaatcagagaagaagattatttcttaattccaacggcggaagtgccgattacaaacatgcatcgcgatgaaatcctttcaggtgacagcctgccgatcaactatgcggcattcagtgcttgcttccgttctgaagctggttcagcaggacgtgacacacgcggattaattcgtcagcaccaatttaataaagttgagcttgtaaagtttgtgaagcctgaagattcttatgaagaattagagaaacttacaaaccaagcagaacgggttcttcagctgcttgagcttccataccgtgtcatgagcatgtgtacgggtgacttaggctttacggctgcgaaaaaatacgatatcgaagtttggattccaagccaagacacatatcgagaaatctcttcttgcagcaacttcgaagcgttccaggcgagacgtgcgaatattcgtttcagacgtgaagctaaaggcaagcctgagcatgtacacacactgaacggttcaggactggcggttggaagaacagttgccgctatcttagaaaattatcagcaggaagacggaagcgttgtgattccgaaagtgctccgtccttatatggggaatagagaagtaatgaaaccgtaaattatggaaaggcgtgcctgacaaggtgcgcctttttgcttatgtaaacacggcattttcataaaaacaaaaaaagtttttaaaaatgcttgaccacacgagaacatacgtgatatagtaagtcttgtcgatacggaggaatacccaagtccggctgaagggatcggtcttgaaaaccgacaggggtgtcaaagcccgcgggggttcgaatccctcttcctccgccatattgattttaattctaatgaaacacaagcatatattggagattgttttgtccgttgcattcggtgcggcggattttttattttaaagaaaaagtgaatctcgactgagattcactttttttgattatcatgaataactgaagcaatttgatctacaatattttcaatcgagttttcgtcgttcagaagatcataatcttcaatgcgaagttttaaaacagggcaggcattaaaaccgcttatccagttctcgtagcgtgtatgcatttcttcccaataagacctgcttgtctgaagctccatctcacggccgcgttgttcaatccggtttaaaatgttctccagatctccttctaaatagatcagcacatctgggtgtgggaaatacggtgtcattaccattgcttcgaaaaggcttgtgtaagtcttataatcaacctttgacattgtccctttatcagcatgcatttttgcgaaaattcctgtatcttcataaatcgaacgatcctgtacaaaacctccgccggcttcaaaaattgttttctgttctttgaagcgttcagctaagaagtaaatttgaaggtgaaagctccaacgttcaaaatcatgatagaacttttccaagtatggattatgatcgacttcctccaaagatgttttaaatccaagccgtttagctaaagtttttgttaaagtcgattttccgacacctactgttcctgctactgtaataattgaattcttagggatatgatgttccttcatacgataagctcctttacatgggcggcaatgcgttcaaagtcgctcttattcaaaacgaaatcctttgaatcaccatctacggttaacactgtaagttcagggtctgcttcctgcagctgcttgatggcgacttcataatctgaaatcagctgctccaaatagctagtttcaatttttttctcaaaggggcgcccgcgtttttcaatgcggtgtagcaatgtaggcagactggcctttatgtaaatgatgaaattcggctttggcagatcatccgttagcaggtgatatatctttttgtatttttccagctgatgtggagacaaggtgcgttccgcaaaaatcacatttttataaatatgataatcagctattacaggctgtcccttttttaaaaagtgatcactggtgtcttcaagctgtttgtatctgtgacaaagaaaaaacatctcgagctggaagctccattcctctatattgtcataaaacttatcaaggtacgggttatcctctacaatctcattgatcatagggaatccgaattcttgtgagagcatcgttgcgagagttgtttttcctgccccgataggaccttctattgcaataaaaggggctgtattcatcggaatcctccttatatctgaaaaacgtgcgtcagttaccgaccttcatattgtatcacaacccttgggtgcccccatgaaaaaagacgtttccaaattatcgaaacgtctttttgacaacattaaattgatcagacagcagcagccagttttgtggaaaggaaagacccagcttccaatagctgatgcctcttaaattcagctctttaatcagattaaattttgcttgaatcgagcgggcatcctcgaaccatacctcgtgccttctgttttctgcatcagtatagcggaagaaaggagcttgagcggtttggtcatactgaatggaagcattgttctgatcagctatgacaatggcttgctgagggcttactgctcttgctggagttccccctgctgtatatggcagcgtccagtcatatccatataaattctggcccatgacaattttgttcgcaggcatttcagtcaaagcatattctatgacatcacggacaggtccaattggagaaaccgcttgaggcggcccgccgctatagccccattcatatgtcatgagaacaacaaagtcgacaatttggccatgcgccctgtaatcatgagcttcataccatctgccctgctgtgttgcacttgttttaggagcaagtgccgtagaaatttctaagccctctcgatgaaaaagatcccttgcttcgcggagaaattgattataggcctctctatcctggggccgcaaatattcaaagtcgaaatgaatgtcacggaagccatatctcttggcattctccactatttcatttagaagccttctttttacagtttcgtcgttcaaaaggatccggccaagttcatcactaaatgcctggttttctaggttcgttataatcatcatcaatgttgtattttgactttctgtaatgctccttaaattcgttaaaggcggtgcgactaaggttccgttccgctgtgcctggaagctgaatgcgccaaggtacgttaagtagggcgacgcttctctggccgcctgctggagattttcgctgacttgatttcctcggggctccaaataagcatttgattcgatgtctcgtttaggggctggtgggatgtatatacggaaaccaatctgaagcacggtatttaactggatgcggttaacccttgcgagctcggctgctgttgtattgaactgccgggcgatggatgtcagggtatcacctcgcttcacatcatagaactggccggctattggaatgacaatggtttgtccgacaacaaggctgtcgggattcggtatttcattcgtttcagtgatctcatttgcggttgttctgtattgtgaagcgatagcagaaagagtgtcgccttgttttaccacataaatttgaatgaaaaacgcctcctttcatatcgctatcaatgtatgaaagaaaagcgctgatcatgtttatttttctgtaatttgttcttccgtcgtaatttctgcgaaaagaacattctccatcatagttaaggcgaattcgttatcttcgtcactgtttgacgcgatacagtccttaggaatcgtgatgctgtattccctcatataagcgtcattagcggtaaacagcacacatatattgccggctatacctgttaagataatatgtctcacctgcaactcagtaagaagggtgtgaagtgcagtttcgtagaaagcggaatgttttggtttgattaaaaaataatcagcatcttccggggctatcttagtgatgatatccttgcttctttcatttgtgcattcttgctgaatgtttttaatgtcagcttgccaaagtccataatgatcattgatgtaaataatcggccattcattttgtctcgcgtgctcctttaatgataaaatatgaggaacgattttttctgtttttttagcgagggtttctcccatatcgaattcaaaattattgatcatgtctacaatgagaagggctgtatctgctttggacaatcgacagtctcctttccgtttcagttatagttaatatgtagcctttttaggcaatgaaaaaactttgaaaagagagcttatccttatgacacaagatgaactttatatgaaagaagcaattaaagaagcgaaaaaggctgaagagaaaggtgaagtgccaataggtgcggtgcttgtcgttaatgatgaaattatagcgcgtgcacataatttaagagagactgagcaacgatctattgcccatgcagaaatgcttgtgattgatgaagcgtgtaaggcactgggaacatggcggctggaaggtgcgactctttatgtgacgcttgagccttgtccaatgtgtgctggtgcagtcgtactttctcgagtggaaaaagtggtttttggcgcatttgatccgaaaggcggctgttcaggcacgctaatgaaccttctccaggaggaacgctttaatcatcaggctgaagtggtgagcggtgtacttgaggaagaatgcggcggaatgctcagtgcgtttttcagagaactaagaaaaaagaagaaagctgccaggaaaaacttgtctgaatagtacggttgcaatttttaggggaaacagatatacttaagtgtgcatcgtaatagatgcaacataaaatttgatatttattttgccgtgctaagcggggaggtagcggtgccctgtacctgcaatccgctctagcagggccgaatcccttctcgaggttcgtttactttaaggcctgccttaagtaagtggtgttgacgtttgggtcctgcgcaatgggaattcatgaaccatgtcaggtccggaaggaagcagcattaagtgaaacctctcatgtgccgcagggttgcctgggccgagctaactgcttaagtaacgcttagggtagcgaatcgacagaaggtgcacggtaaatcaatcatcaaattttcagactcacctaatattaggtgagttttttgttatgtaaaaagagcttttggaatcgaaacaaggttcatgtataatgggaatgatgaataacggaggagggcaaacccgtgagttaccaagctttatatcgagtattcaggcctcagcgctttgaagatgtggtcggacaagaacacattacaaaaacgctgcaaaatgcccttttgcaaaaaaagttttctcacgcctatctgttttccgggccaagaggaaccggaaaaaccagtgcagccaaaatatttgctaaggctgtcaactgtgaacatgctcctgttgatgagccatgcaacgaatgtgcggcctgtaaagggataacaaacgggtcaatatccgatgtcatagaaattgacgccgcttctaataacggtgttgatgagattcgtgacattcgcgataaagtgaagtttgccccgtcggccgtcacatataaggtatatatcatagatgaggtgcatatgctttctatcggcgcttttaatgcattactaaaaacattagaagagccgcctgagcattgtattttcatattagcaacaactgaaccacacaaaattcctttaaccattatctctagatgtcagcgttttgactttaaacgaattacctcccaggcgattgtaggccgcatgaataaaattgttgatgctgaacagctgcaagtggaggaaggatcgctggatatcatcgcgagtgctgcagacggagggatgagggatgccctgagccttcttgatcaggccatatcattcagcggcgatatcctgaaagtcgaagatgcgcttttaattacgggtgctgtttctcaattatatatcgggaagcttgcacaatccctgcatgataaaaacgtttctgacgcactggaaacattaaatgaattgcttcagcaaggaaaagatccagctaagctgatagaagatatgattttctatttcagggacatgctgctgtacaaaacagcccctggcttagagggagttcttgagaaagtaaaagttgatgaaacgttccgggaactaagtgaacaaattccggctcaggccctatatgaaatgattgatattctgaacaagagccatcaggaaatgaaatggacaaatcatccgcgtatctttttcgaagtggccgttgtgaagatttgccaaacctcacatcaatctgctgctgatctcccggaagtggatatgctgatgaaaaaaatccagcagctcgaacaggaagtagagcggctcaaaacaacgggcataaaagcagctgcggaaagcccgaaaaaagaagcgccgcgtgtgccaaagggcgggaaatccaattacaaagcgccagtaggcagaattcatgagattttgaaggaagccacaagaccggatcttgatctgctcagaaacagttggggcaagcttcttgctcatctcaaacagcaaaacaaagtatcacatgccgctttactgaatgacagtgaacctgtggctgccggatcggcggcatttgttctgaaattcaaatatgaaattcattgtaaaatggtcgctgaggataacaacggagtccggactaatcttgagcagattttagaatcgatgctcggaaaaagaatggatttgattggcgttccagaagcacaatggggtaaaataagagaagaatttttagaagatcatcagcaggaaaatgaaggatcaaatgaaccggctgaagaagacccgcttattgccgaagcgaaaaagcttgttggagcggatttaattgaaataaaagactaacaaaatgaaagagagtgaatgctatgcgtggcggaatgggtaatatgcaaaaaatgatgaaacaaatgcaaaaaatgcaaaaggacatggcgaaggctcaagaagagcttgcagaaaaggttgttgaaggaactgcaggcggcggtatggtaacagtaaaagcaaacggccaaaaagaaatcctggatgttatcatcaaagaagaagtcgttgatcctgaagatattgatatgcttcaagatttagtgcttgctgcaacgaatgaagctttgaaaaaagttgacgaaatcacaaacgaaacaatgggtcaatttacaaagggaatgaacatgccaggtttattctagggggataaaagaacatgcaatatcctgaaccaatatcaaagctgattgacagctttatgaaattgccagggatcggaccgaaaacagcggttcgtctggctttttttgttctaggtatgaaagaagatgtagtattagattttgcgaaagcattagtaaatgcgaaacgcaacctgacatattgttcagtttgcgggcatattacagatcaggacccttgctatatatgtgaagatacgcgcagggataagtctgttatctgtgttgtgcaagaccctaaggatgttatcgctatggagaaaatgaaggaatacaacggacagtatcacgttcttcacggcgctatttctccaatggacggcatcggaccggaggatattaaaataccagaattgttaaaacgattacaggatgatcaagtgacagaagtgatcctcgcgacaaaccctaatatagaaggggaagcaacggcgatgtatatatcaaggctcctcaagccgtctggtattaagctctcccgtattgcccacggactgcccgtcggcggtgacttggaatatgctgacgaggtcactctttctaaagcacttgaaggaagacgtgaattgtaaggaggaaaaagcgatccatgggttttcttcgcaagaaaacattaagaagagagtttgatgaaaaactaaccgagcagctttttaagcaaaaggaagagtggaacaggcaaaaaaagctggtcgaaaaaagcttagaaccgtctgctgaagtgttatacgaactgaaagtagctgaagcgaagtattttttttacttaagggaagcgaagcagcgaaatttaaaaatcagccggtggaagtaagtggtctaaactcctggatcttctcataagcttgtactagaacaagcgaaggagatgagaagattcatggagcctatttttattattgggattattttaggactggttattcttctttttttatcaggttcaactgcgaagcctttaaagtggatgggcatcacagctgttaaatttgtggcaggtgctttgctgctggtttgtgtaaatatgtttggcggcagtcttggcattcatgtgccgattaatctggttacaacagctatcagcggaattttagggatacccggaatagctgcgttagtcgttattaagcaatttatcatttaattgatattatgtattgacttagacaactgaaggtgttattctaatatacgtcgctgatgacgaacagcttttttgaaaaggaaatgctaaaaagttgttgacagtagcggcggtaaatgttatgataataaagtcgcttaaacgagcggtaaacaaagttctttgaaaactaaacaagacaaaatgtacctgttaattcatttttataaatcgcacagcgatgtgcgtagtcagtcaaactactttatcggagagtttgatcctggctcaggacgaacgctggcggcgtgcctaatacatgcaagtcgagcggacagatgggagcttgctccctgatgttagcggcggacgggtgagtaacacgtgggtaacctgcctgtaagactgggataactccgggaaaccggggctaataccggatggttgtttgaaccgcatggttcaaacataaaaggtggcttcggctaccacttacagatggacccgcggcgcattagctagttggtgaggtaacggctcaccaaggcaacgatgcgtagccgacctgagagggtgatcggccacactgggactgagacacggcccagactcctacgggaggcagcagtagggaatcttccgcaatggacgaaagtctgacggagcaacgccgcgtgagtgatgaaggttttcggatcgtaaagctctgttgttagggaagaacaagtaccgttcgaatagggcggtaccttgacggtacctaaccagaaagccacggctaactacgtgccagcagccgcggtaatacgtaggtggcaagcgttgtccggaattattgggcgtaaagggctcgcaggcggtttcttaagtctgatgtgaaagcccccggctcaaccggggagggtcattggaaactggggaacttgagtgcagaagaggagagtggaattccacgtgtagcggtgaaatgcgtagagatgtggaggaacaccagtggcgaaggcgactctctggtctgtaactgacgctgaggagcgaaagcgtggggagcgaacaggattagataccctggtagtccacgccgtaaacgatgagtgctaagtgttagggggtttccgccccttagtgctgcagctaacgcattaagcactccgcctggggagtacggtcgcaagactgaaactcaaaggaattgacgggggcccgcacaagcggtggagcatgtggtttaattcgaagcaacgcgaagaaccttaccaggtcttgacatcctctgacaatcctagagataggacgtccccttcgggggcagagtgacaggtggtgcatggttgtcgtcagctcgtgtcgtgagatgttgggttaagtcccgcaacgagcgcaacccttgatcttagttgccagcattcagttgggcactctaaggtgactgccggtgacaaaccggaggaaggtggggatgacgtcaaatcatcatgccccttatgacctgggctacacacgtgctacaatggacagaacaaagggcagcgaaaccgcgaggttaagccaatcccacaaatctgttctcagttcggatcgcagtctgcaactcgactgcgtgaagctggaatcgctagtaatcgcggatcagcatgccgcggtgaatacgttcccgggccttgtacacaccgcccgtcacaccacgagagtttgtaacacccgaagtcggtgaggtaaccttttaggagccagccgccgaaggtgggacagatgattggggtgaagtcgtaacaaggtagccgtatcggaaggtgcggctggatcacctcctttctaaggatattatacggaatataagaccttggctcttataaacagaacgttccctgtcttgtttagttttgaaggaactttgttccttgaataagttaagatgggcctgtagctcagctggttagagcgcacgcctgataagcgtgaggtcggtggttcgagtccactcaggcccaccatcttatataacggggccttagctcagctgggagagcgcctgctttgcacgcaggaggtcagcggttcgatcccgctaggctccaccaacgtgttctttgaaaactagataacagtagacatcacattcaattagtaacacaagatatcacatagtgattctttttaacggttaagttagaaagggcgcacggtggatgccttggcactaggagccgatgaaggacgggacgaacaccgatatgcttcggggagctgtaagcaagctttgatccggagatttccgaatggggaaacccaccactcgtaatggagtggtatccatatctgaattcataggatatgagaaggcagacccggggaactgaaacatctaagtacccggaggaagagaaagcaaatgcgattccctgagtagcggcgagcgaaacgggattagcccaaaccaagaggcttgcctcttggggttgtaggacactctatacggagttacaaaagaacgaggtagatgaagaggtctggaaaggcccgccataggaggtaacagccctgtagtcaaaacttcgttctctcctgagtggatcctgagtacggcggaacacgtgaaattccgtcggaatccgggaggaccatctcccaaggctaaatactccctagtgaccgatagtgaaccagtaccgtgagggaaaggtgaaaagcaccccggaaggggagtgaaagagatcctgaaaccgtgtgcctacaagtagtcagagcccgttaacgggtgatggcgtgccttttgtagaatgaaccggcgagttacgatcccgtgcaaggttaagcagaagatgcggagccgcagcgaaagcgagtctgaatagggcgcatgagtacgtggtcgtagacccgaaaccaggtgatctacccatgtccagggtgaagttcaggtaacactgaatggaggcccgaacccacgcacgttgaaaagtgcggggatgaggtgtgggtaggggtgaaatgccaatcgaacctggagatagctggttctctccgaaatagctttagggctagcctcaaggtaagagtcttggaggtagagcactgattggactaggggcccctaccgggttaccgaattcagtcaaactccgaatgccaatgacttatccttgggagtcagactgcgagtgataagatccgtagtcgaaagggaaacagcccagaccgccagctaaggtcccaaagtatacgttaagtggaaaaggatgtggagttgcttagacaaccaggatgttggcttagaagcagccaccatttaaagagtgcgtaatagctcactggtcgagtgactctgcgccgaaaatgtaccggggctaaacgtatcaccgaagctgcggactgttcttcgaacagtggtaggagagcgttctaagggctgtgaagccagaccggaaggactggtggagcgcttagaagtgagaatgccggtatgagtagcgaaagaggggtgagaatcccctccaccgaatgcctaaggtttcctgaggaaggctcgtccgctcagggttagtcgggacctaagccgaggccgaaaggcgtaggcgatggacaacaggttgatattcctgtaccacctcctcaccatttgagcaatggggggacgcaggaggatagggtaagcgcggtattggatatccgcgtccaagcagttaggctgggaaataggcaaatccgtttcccataaggctgagctgtgatggcgagcgaaatatagtagcgaagttcctgattccacactgccaagaaaagcctctagcgaggtgagaggtgcccgtaccgcaaaccgacacaggtaggcgaggagagaatcctaaggtgatcgagagaactctcgttaaggaactcggcaaaatgaccccgtaacttcgggagaaggggtgctctgttagggtgcaagcccgagagagccgcagtgaataggcccaggcgactgtttagcaaaaacacaggtctctgcgaagccgtaaggcgaagtataggggctgacgcctgcccggtgctggaaggttaagaggagcgcttagcgtaagcgaaggtgcgaattgaagccccagtaaacggcggccgtaactataacggtcctaaggtagcgaaattccttgtcgggtaagttccgacccgcacgaaaggcgcaacgatctgggcactgtctcaacgagagactcggtgaaattatagtacctgtgaagatgcaggttacccgcgacaggacggaaagaccccgtggagctttactgcagcctgatattgaatgttggtacagcttgtacaggataggtaggagccttggaaaccggagcgccagcttcggtggaggcatcggtgggatactaccctggctgtattgaccttctaacccgccgcccttatcgggcggggagacagtgtcaggtgggcagtttgactggggcggtcgcctcctaaaaggtaacggaggcgcccaaaggttccctcagaatggttggaaatcattcgcagagtgtaaaggcacaagggagcttgactgcgagacctacaagtcgagcagggacgaaagtcgggcttagtgatccggtggttccgcatggaagggccatcgctcaacggataaaagctaccccggggataacaggcttatctcccccaagagtccacatcgacggggaggtttggcacctcgatgtcggctcatcgcatcctggggctgtagtcggtcccaagggttgggctgttcgcccattaaagcggtacgcgagctgggttcagaacgtcgtgagacagttcggtccctatccgtcgcgggcgcaggaaatttgagaggagctgtccttagtacgagaggaccgggatggacgcaccgctggtgtaccagttgttctgccaagggcatcgctgggtagctatgtgcggacgggataagtgctgaaagcatctaagcatgaagcccccctcaagatgagatttcccattccgcaaggaagtaagatccctgaaagatgatcaggttgataggtctgaggtggaagtgtggcgacacatggagctgacagatactaatcgatcgaggacttaaccacattttgaatgatgtcacacctgttatctagttttgagagaacactctcaatttgtttggtggcgatagcgaagaggtcacacccgttcccataccgaacacggaagttaagctcttcagcgccgatggtagtcgggggtttccccctgtgagagtaggacgccgccaagcaagtttaaacccagctcattgagctgggttttttgtttacttaagatcgagaaaatcaaacaaatacaaacaccgagggcttatatagcccatatactgatttaaagtttcaaaaaggtctaaatagtgtatacaatatccgttttaaggggaggctaactgtacggaggtggagaagatggacgaaacagttaaacttaatcatacatgtgtgatttgtgatcaagagaagaatagaggcattcatctttatacgaaattcatatgcttagattgtgagagaaaagtaatttctacatcaacttctgatcctgactatgcgttttacgtaaaaaaactaaagagcattcatacaccgccattatattcatagacctgaaaaggtctttttttgtactcttaataataaaaagaagatgaaacttgtttaaggattgaacgtagtagataataatattaaaactgagtatagacacaggagtcgattatctcatgcagagattttttcactttttgatgtggagtttaactagcagtgcgacttttgttttcattggaatattgagcttttttggtttaaaccagtcgctttttttatctattgtttatgggcttgcttctggagcagccgtatatatagctggcatctggaatgcaagacggttatttcttaaaaagcatgaattgacaggaagagagtatgcttacattaagaaaaacttagaggaagcaaggcagaaaatgatccgtcttaggaaagccttgtttcaggctaaaagcattcaaatgtttaagcaaaatgcagaaatgctaaggattgtgagaaggatttatctcctcaccaaaaaagagccaaagcggttttatcaggcagaacgatttttttatcaaactctcgattcggttgttgaattaacagagaagtatgcttttctatcatctcaccccaaaaaaagcaaagaactttcgatgtcgttaagtgagacacgcatcactcttactaaattgaccaagcgtttagaggaagatttaactcaagtaatgggtgatgaaattgacgagttgcactttgaattagacgcagcaaaacattcattaaagaaataagggaagagggtaagagcgatgaaccgagaccaaagcgaccttcatatagatgaattattggcagatccttttggtggtaacatagagataccaggttcggaggctgtaaaagcagagaaagagcaagtacggcttgttgatgttcttcctgaggaaaacaagaaaaaagcaattcagcttgctggacagattgatcataaaaatatgcaaagcattgtcttatacggttcacaagctcaatctaaactgctgaacttttctcatgatatgattaatcatgttcaaaagaaggatgtcggggaaattggcgaaatacttggagagctgatgaaaaagctggagcaagtaaatcctgatgatctccaatctaagaaaaagggttttttggcacgcatgtttggaagagtatcaagttctcttcaagaggtgctgtctaaataccaaaagaccagtgtgcagatagacaaaatcagcttgaagctggagcactctaaaaatgctttaattagtgacaacaagctgttagagcagttatatgaaaaaaataaagaatattttgccgcgctgaatgtttatattgctgcaggagaactgaagctggaggaattaaaaacaaaaacgattcctgaactgaagcaacaggctgaatcgagtgatcataaccaaatggccgttcaagaggtgaatgatttaattcaatttgctgaccggttagataaaagggtgcatgatttgctgctgagcaggcaaattacaatccaaagtgcaccgcaaatcaggctgattcaaaacacaaaccaagcgttagcagaaaagattcagtcatccattgtgacagcgattccgctatggaaaaatcaagttgccattgcactgacgcttttaaggcagcgcaatgcagtggatgcacaacagaaagtatctgatacaaccaatgagcttttgctgaaaaatgcggagcttttaaaaaccaatacaattgaaactgtacgagcaaatgaacgaggccttgttgatatagataccttaaaaaaggtgcaggaaagcttaataagcacgcttgaagaaacactgactatacaagaagaaggacgaatcaaacgccgtcaggcagaagaagagctgatgatgatggaaggcgacctaaagcaaaagctgcttacaataaaggaaagatagttaccagtaagtctggctttaagttctgtcagaggcacgatataataaggtgtaagaagacacattcaaaggattgttttcatgaacacacctttatataaagcattaattcaacatgcgagaagaaattctcattcatttcatgttccgggacatcacaatggagatgtcttttttgatgacgctaagtcaatattcaatccgcttctcaccattgatgtaactgaactggcaggactggatgatctccatcatccttctggggtgattaaggaagctcaggagcttgccagtcaattatatggatcggcggaaagtttttttctggtaaatggtacgactgtcggaaacttagcgatgattttatctgtttgtgaacctggtgatacaattctggttcaaagaaactgtcataaatctgtatttcatgctgttgatttgtccggtgctgagccggtttatcttgcacctgacgttgattcagcgatgcatgtgcctacgcatgttccgcttggaacaattaaagaggccctggaagcatatccagatgcgaaaggcttggtactgaccaatccgacatattacggacatagtgctgatttgactgagatcattactgaagcccatcattacgggattcctgttttggtcgatgaagcgcatggcgcacattttattttaggtgagccttttccggtctcagctttaaaaatgggggcagatattgttgttcagtcggcccacaaaacgttgcctgccatgacgatgggttcttatttgcatctcaacagcagctgcaggattaacagggatcgggtggcagagtatttaaaccgattacaaagcagcagcccgtcttatccgattatggcttcgttagatattgcccgcgcttatgtacagcatattatagaagaacaaaagctttctgacattctgcagcggatagaaacacttaaacaaacgtttgattcacttacaaatgcagaagctgttaaccctgctaatccactgatcatcacggatccgctaaagctcacaattcgttcaaaacgcggacattctggctatacgctgcaaagcatattagagcgtgccaacatattcactgagcttgctgatgaaaatcaagtactgctcgttctcccattgggaggaaaacggagaataaatgctgaaaccattagaagcattgatgaagagattgagaaaacgcctccggatcaggcgtttgtttctgcagaatggggagtgcagcctgttactgtcttgccttatccaaaaaaggtcttacattcgtttaagaaagaatatgtggactttgaggaagcagctggccggctgaatgcagaagatatcatcccttatcctccgggtatcccgatgattatggcgggagaaagaataacaaaagaaagtgtgcaaaagctcagccgcttgatcagcatgaaaacgcatgttcaagggaatatgaaaatcaaagagaaacaactacttgtttatatagaagaggagaaatcatgagcggtttatttattacattcgaaggtcctgaaggtgcagggaaaacgactgttctgcaggagatcaaaaacatactgacagcagaaggccttcaggttatggcaactcgagagccaggcggaatagatattgcagaacaaattcgagaggttattctgaatgagaacaatatattaatggacccaaaaacagaagctctcttatatgcggctgcaagacgccagcatttagttgaaaaagtaaaacctgctttagaacagggggttatcgttctttgcgacagattcatagacagttctcttgcgtatcaaggatatgcaagagggcttggaattgatgaggttctgtccattaatgaatttgccattggagatatgatgccccatgtaacggtttatttttcaattgatccggaagaaggactgaagcgtatttacgcaaacggctcacgggagaaaaacaggctcgatttagaaaaactggactttcatacaaaagtacaagaaggttatcaagagctgatgaagcgatttccggaaagatttcattcagttgatgccgggcaatccaaagacctcgtcgttcaggatgttctaaaggtgatcgatgaagcgttgaaaaaaattcaattgtgacctgtttcccaatagttgatataataatgtaaacgagatcacgttgtttccaatctaaaggaggccttcacagatgaaattgatagtggcagttgtacaagatcaggacagcaacagacttttgaaaaccttaacggatcacaacttcagagtcacaaagcttgcgacgacaggaggatttcttaaatcaggcaatacaacgtttatgatcggtgtcgaggatatacgcgtcaataaagcgttgagtctcattaaagaaaacgggcagaaacgtgatcagatgattgcccctgtatctccaatgggtggaaatgctgattcctatgtcccttatccagtcgaagttgaagttggcggagcgacagtatttgtccttccagtcgatgaatttcatcaattttaaggatctgaaactgtgaaaattaataaagatatacgtacatttatagataataagcagattccctctgtgaaaacatctgagatcacggcatcgtttaaaacatcaatggaaaaccaaagcagcaaaatgaagcttgatcagcttaccaggttgttatctgatatagaagcattcggaaaaaggctaacgaaatctcggaattttaaagacttagcgagatttaaaggacttgtgaaacgttttgtcaaggaagctgtggacagcggcctttcacatgaaacatcgaaaagctttgacctttacgggaacagcagaacgctgggacttgtgaaagaaatagatgacaaattgatacagcttacggaagagatgatggatcaggaaaaaccggcaattgatttgctggagcgtattggcgaaataaaaggtttattaattaacctttacacatagagagtgatacaatggcaatatcctggaaggaaatgaacgagcttcagcccagagtgatgaagcttttatataatagtattgagaaggacagactatcacacgcttatttgtttgagggaaaaaaaggaacaggcaagcttgatgccgcgctgcttcttgcaaaaagcttcttttgtctggaggatggcgcggagccttgtgagagctgccgaaactgtaaacggatagagtcagggaaccatcctgatctccatcttgttcagcctgatggcttatcaatcaaaaaggcgcaaattcaagcgctccaagaagagttttctaagacaggacttgaatcgcataaaaagctgtatattatttcgcacgcagatcaaatgacagcaaatgcggcgaacagcctgctgaaatttttagaagaacctaacaaagacacaatggccgtcctcatcactgagcagccccaaaggttattggataccatcatttcaagatgccaaacccttccttttcagcctttgcagccgaaagcaattgaagatagactgatcgaacaggacgtctcgcctcatatggcaaggcttctagccaacatgaccaataatgtagcagaagcagtcgaattaagtcgaaatgatgagtttgcagagtctagagcgaaagtgataaaattgtatgaagtcctacaccagcggaaaggacatgcttttttctttattcaagatcaatggatgccctttttcaaagaaaaaacccatcaagaaatgggtcttgatatgctcttattgatatatcgtgatgtgttgtccatccaaataggaaatgaagataaattgatttatcaagacttattccaatcaataaaacagcatgcgctacaatcaacacaacaaagcgttacgaatcagatacttgctgttttagaagcaaagaaacggcttcattccaatgtgaatgtacaaggattaatggagcacttggtgttaatgttgcaggagggataagcttgtacaatgtaattggtgtccgctttaagaaagcgggtaaaatatattattttgatccgaatggatttcatatagaacatgacagctgcgtaattgtagaaactgtcagaggcgttgagtacggccaggtcgtaattgcaaataaacaggtggatgagcatgatgtggtgcttccccttcgaaaagtgatacgtgtggctgacgagcgcgatcttctcattgtagaagaaaataaacaggaagcactatcagcatttgatatctgccaaaagaaagtgattgagcatggcttggatatgaagctggtcgatgttgaattcacgtttgatcgcaataaagtcattttttacttcactgctgacggccgagtcgactttagagagcttgtaaaggatttggcttctatctttaagacaagaattgagctgcgccaaatcggagtgagggatgaggcaaaaatgctcgggggaatcggtccttgcggaagaatgctttgctgttcaacgtttcttggagattttgaacctgtttccattaaaatggccaaggatcagaacttgtctttaaatcctacgaagatttcgggtctttgcggacgattgatgtgctgtctaaaatatgagaacgatgagtatgagacggcaaaagaacagcttccggatataggagaaatgattacgacagcaaacggtcccgcgaaggtcgtcggactaaatattctggaacgggtgcttcaggtggaactgataaaccgtgaaaaagtgatagaatatacttgggaagagctcttggaagagggcgtcgtatccgcacaaaccacagattaacgaggtgtggaaccttggataaaaaagagttatttgatacagtcattaacttagaagaacaaattggctcactgtacaggcagctgggggatttgaagcagcatatcggtgagatgattgaggaaaatcatcatttacagcttgaaaacaagcatttgcgcaaacggctggacgatacgacgcagcagattgaaaagttcaaagctgataaaaaagaatcaaaaacacagaagacagagcaaactgatataggggaaggatatgataatctggcacgtctgtatcaagaaggatttcatatctgcaatgtccactatggtagtgttcgaaaagaagattgtcttttctgtctgtcattcttaaataaaaaatagggaaaaggcttccgcataagacgggagcctttttcaaaggtactgaaaggataagaagatggtttcattacatgatgatgaaagattagattatttgctggcagaggacatgaaaatcatacaaagcccaacagtgtttgctttttcgttggacgctgtgcttctgtccaaatttgcgtacgttccgattcaaaaagggaaaatcgttgatttatgcaccggcaatggtattgtgccgctgctgctcagtacaagatcaaaagcagacattctgggagtcgaaatacaagaaaggctgcatgatatggctgttcgcagcgtggagtataataagttggacgatcagattcagatcatacatgatgacctgaaaaacatgccggagaaacttggacataatcgatatgatgttgtcacctgcaatccgccgtattttaaaacaccgaaacaaactgaacaaaacatgaatgagcatctccgaatcgcaagacatgaaatccactgcacactggaggatgtcatttcagtcagcagcaagctgctcaagcaagggggaaaagcagctcttgttcaccggccgggaaggcttctggagatttttgaactgatgaaggcttatcaaatcgagccaaaacgtgtacaatttgtctatccgaagcaagggaaagaagccaataccattttggttgaaggtatcaaaggcgggcgcccggatttaaaaattcttcctcccttattcgtttatgatgaacaaaatgaatatacaaaagaaatcaggaccattttatatggagacaaataaccatttcttctacgtcgtgaaatgtaaggacaatagctggtatgccggatataccaacgatctgcataaacgagtgaaaacgcacaatgatggaaagggcgcaaagtacacaaaagtaagacgtccggttgaattaatttttgccgagagcttttcaacaaagcgggaagctatgcaggcggaatattatttcaaaaaactaactcggaagaaaaaagagctttatatagaagaaaagcggaacagcaaggaggctgtatatgttaaggcgccaaatgagctttaatggaaagtcggacatggggattctttacttggtcccaaccccaatcggaaatctagaggatatgacattccgggcgatcgacacgctgaaatcggtggatgcgattgctgcggaagatacgaggcaaacgaaaaagctttgtcatgtatatgaaattgaaacaccgctcgtcagctatcacgaacacaataaagaaagcagtgggcacaaaattattgaatggctgaagtcgggaaaaaacattgctcttgtcagtgatgccggtctgccgacgatttctgatcccggagcggaaattgtaaaggattttacggatataggcggttatgttgttccgttgccgggagcaaatgccgcattaacagctcttattgcttcaggtattgtaccgcagccttttttcttttacggttttctcaacagacagaaaaaagaaaagaagaaggagcttgaagcccttaaaaaacggcgggaaacgatcattttttatgaagcgcctcacagattgaaggaaaccttgtcagcgatggcagagatattaggagatcgggaaattgctgtaacgcgtgaactcactaagaaatatgaagagtttatccgaggaaccatatctgaggtcattggatgggcaaacgaagatcagatacgcggcgagttttgtcttgtcgtagaaggaagtaataatgaagaggtagatgaggaagaacaatggtgggaaaccctcactgcgaaagaacatgtcgagcattacatctcgaaaggcgctacgtctaaagaagccattaaaaaagcagcagtcgatcgcaatgtaccaaagcgtgaagtgtacgatgcttaccatattaagcaataaaaaaacgttcttgtgtcataacaagaacgttttttgtacaagaaatgattatttaaggttttgaagctggttttggatttcgctgatgatttgctcagcgccttctttactaagaaccaatttaccgcctgcaagtttaaggttatcatcagaaacttcaccagttacttggcaagtcatgtttggtttatattttttaaggatgattttttcatcatcaacatagatttcaagagcatctttttctgcgattccaagagtacgacgcagttcgataggaataactacacgtcctaattcatcaactttacgtacaataccagtagatttcataaacattctcctcccaagagatacttatttgtttaaattatatttttcttcgtcattattcgacaaaatccttaccttcatagcataacaaggtttccaataatcgtcaatcattttgtttactattgattgtaagaattagttcttatagtcagtaatgtcttagaaactaccgaaataacagcattttataaatatttaataaagctattatcctactaaaaatccttttaaatcaagactttcgaaccaaagttttttatttcatttgattatatacgacaaaattcgacacgaacagactttttttattttcattaaagatttttaattttaattattctttttcagggcgtatgtatatattcttgatcttaaaggctaagatggtatcatagataaaggataaatataaataatattcatatatgatttgcacttatcgccgctctcgtcctttgggcgggagctttttgacattctgattaggaggtttcaagatgccgcaagaaaacaatacattttacattacaacaccgatttattatccgagcggaaaattacatatcggccatgcatatacgacagtcgcgggagatgcaatggcacgttacaaaagattaaaagggttcgatgttcgctatttaacgggaacggacgagcatggacaaaagatccagcaaaaagctgaacaggaaaacattacacctcaggagtatgtggatcgcgcagcggcagatattcaaaaactgtggaagcagcttgaaatctcaaacgacgactttatccgcacgacagaaaaacggcataaagttgtcattgaaaaggtgtttcaaaagcttcttgataacggggacatctatcttgatgagtatgaaggctggtacagcatccctgatgaaacgttctacacggaaactcagctcgttgatattgagcggaatgaaaagggagaggtcatcggcgggaaaagccctgacagcggtcacccagttgaattgatcaaagaggaatcttatttcttccgcatggggaaatacgcggatcgtcttctgaaatactatgaagaaaacccgacattcattcagccagaatcacgcaaaaacgaaatgattaataactttatcaaacctggacttgaggatttggcagtatcacgtaccacttttgattggggcgtgaaggtgccggaaaatccaaagcatgttgtatatgtttggattgacgcactatttaactatttaacggcactcggttatgatacagaaaatgatgagctttatcaaaaatattggcctgccgatgttcatttagtcggtaaggagattgtacgattccatactatttactggccaattatgctgatggcgctggatcttccgctgccaaagcaagtattcgcgcatggctggcttttgatgaaagacggaaaaatgtcgaaatcaaaaggaaacgttgtagatccggttacattaattgagcgctatggtttagacgagcttcgctattacctgcttcgcgaagtgccgttcggatctgacggagtattcacgccggaaggatttgttgagcggattaactatgatttagcaaatgatttaggaaatctattgaatcgtactgttgcgatgattaataagtattttgacggacaaatcggttcttacaaaggtgctgttacggaatttgaccatacgctaacttctgttgctgaagaaacagtaaaagcttatgagaaagcaatggaaaatatggagttctcggtagcactttcgactttatggcagctcatcagccgcacaaacaaatacattgatgagacagctccatgggtgcttgcgaaagatccggcaaaagaagaagaattgcgatcagttatgtatcatctcgctgaatcattgcgtatttcagcggtactgcttcagccattcttaacaaaaacacctgaaaaaatgttcgagcagctgggcattactgatgaatctttaaaagcttgggacagcattacagctttcggccagctgaaagatacaaaagtacaaaaaggcgagccattgttccctcgtttagaggcagaagaagaaattgcttacatcaaagggaaaatgcaaggttcagcaccagcgaaagaagaaacaaaagaagaagagcctcaagaggtcgatcgtttacctgaaattacgattgatcaattcatggatgtagagcttcgcgtagctgaggtcattgaggcagaaccagtgaaaaaagcagaccgtttattgaagctgcagcttgatcttggttttgaaaagcgccaagtggtatccggcattgcgaagcattatacgcctgaagagcttgttggaaaaaaactcgtttgtgtaacaaatctaaaaccggttaaactcagaggagagctttctcaaggtatgatccttgcaggagaagcagacggcgttttaaaggtcgtgtctatcgatcagtcgttaccaaaaggcacaagaattaaataatgataaaacaaaaggtgtttcacgtgtaacaattcgtcgaacaccttttgtgtttcgacaagaaaggagtttttcacttatgttgtttgacacacacgcgcatttaaatgcagaacaatatgatactgatcttgaagaggttattgaacgggcaaaagctgaaaaagttgaacgaattgtcgtagttggttttgaccgtccgacgattacccgtgcgatggaaatgattgaggaatatgattttatttatgcagccattggctggcaccctgttgacgctattgacatgacagaggaagacttagcgtggattaaagagctttctgctcatgagaaagtggtagcgataggggaaatgggactggattatcattgggataaatcacctaaagatattcaaaaagaggtgtttagaaaacaaatcgccttagcgaaagaggtcaatttgcctattatcattcataaccgtgatgcaacggaggatgtcgtgaccattttgaaagaggaaggcgcagaagctgtgggcggaatcatgcactgctttacaggaagtgcggaagtggcaagagaatgcatgaaaatgaatttttatttatcatttgggggaccggtgacatttaaaaatgcgaagaaaccgaaggaagtagtgaaggaaattcccaatgaccggctgctgattgaaacggactgcccgtttctcacaccgcaccctttccgcgggaaaagaaatgagccaagctatgtgaaatatgtggcagaacaaatcgccgaattaaaagaaatgacctttgaagagattgcttccatcacgactgaaaatgcgaaaagacttttccgtataaactgacaaaaaacgctagcgggttttgtaagagcttgtcccttacagcgtttttctataaaagttctacatgctttcttctcctcataggataggtttgtcgacaagtctttcttccgtttctcagtgtatttcaggataatgaagaggacactgagcttttgggagaaagagaagggagggttgacagccttttagatactctatataatctctccgaggagaaggaggcgtttttcatcacacaaaaaatgaaaaagctgttttccgtaaagcttagcaaaagcaaagtcattctggttgctgcttgtttgcttttggcaggaagcgggactgcgtacgcggctcatgagctgacgaaacaatcagtctcagtttctatcaatggcaaaaagaaacatatacgcacacatgcaaatacagtcggtgatcttttggagacgcttgatataaagacaagagacgaagacaagatcacacctgctaaacagacaaagataacagcagacatggacgttgtgtatgaggctgcaaaacctgtgaagcttacaataaacggggaagaaaagacgttatggtcaacagcaaaaacggtcggtgcattactggacgaacaagatgttgatgtgaaagaacaagatcaaattgatcccgtaatagatacagatatttcgaaagacatgaagattaacatagagcccgcatttcaggttactgtgaatgatgcagggaaacaaaagaagatctggacgacttcgactacggtcgctgactttttaaaacagcaaaagatgaacataaaagacgaagataaaatcaagcctgcgttagatgcaaagctgacgaaaggaaaggctgatattacaattactcgtatcgaaaaggtcaccgatgtagttgaagagaagattgcgttcgatgtgaaaaagcaagaagacgcttctcttgaaaaagggaaagaaaaggtcgtccaaaaaggaaaagaaggcaagctaaaaaaacatttcgaagtcgttaaagaaaatggcaaagaagtgtccagagagcttgtaaaagaagaaacagctgagcaaagcaaagataaagtgattgctgtcggcacaaagcaaagcagtccaaaagttgaaacggtcagtgcttcaggtgattcaaaaacagttgtgtcccgcagcaatgaatcaacaggcaaagtcatgactgtatcatctacggcttatacggcaagctgcagcggttgttcaggacatacagcgacaggcgtcaatttaaaaaataatccgaatgccaaagtcatcgctgtggatccaaatgtcattccgctaggctccaaagtccacgtggaaggctatggatatgccattgctgcagataccggttcagcgattaaagggaacaaaatagacgtctttttcccagagaaatcatcggcgtaccgatggggaaataaaacagtcaaaattaaaatcttaaattaatatatacttatgtattcagagggttttgcgccctctgtttttttcgttataatagacaaagtgcattttctgcttattagacgctcgatataagaaaaagtttcatgaatatacaaaagtttttattttgtcttggaggaaataatgaaaattaaagagatcattgtggtcgaggggcgtgacgatacggcccgcatcaaattggctgttgatgcagacacaattgaaacaaatggttcagccatcgatgatcatgtgattgaccaaatccgtttggcccagaagaccagaggcgtcattattttaacggatccggactttccgggagagaagattcgcaaaaccatctcagaggctgtacctggctgtaagcatgcatttttgccaaaacatcttgccaaacctaaaaacaagcggggaattggtgtagagcatgcatcggttgaaagcattagggcatgtttagaaaatgtgcatgaggagatggaagcgcagccgagtgacatttcagctgaggatttgattcatgccggactaataggcgggcctgcggccaaacgccgccgggaacgactgggtgatctgttgaaaatcggctatacaaatggcaaacagcttcaaaaacggctgcaaatgtttcaaattaaaaaaagtgattttatgagtgcgctcgataccgttatgcgggaggaacagaatgaataaagatattgcgacaccgattagaacgaaagagatactgaagaaatacggtttttcttttaaaaagagcttaggacagaatttcttaattgatacgaacattttaaacagaattgtcgatcacgcggaagtgacggagaaaacaggtgtcattgaaatcggcccgggaatcggggctttaaccgaacagcttgccaagcgggcgaaaaaggtcgtggcatttgagattgaccagcgactattgccgattctgaaggatacactgtcaccttacgacaatgtcactgtcattcatcaggacgtgttaaaggctgatgtcaaatcagtcattgaagaacaatttcaagattgtgatgagatcatggtagttgccaaccttccttattacgtaacaacaccgattatcatgaaactgcttgaagaacaccttccgctgaaagggattgtggtcatgctgcaaaaagaagtggctgagcgcatggcggctgatccttcatctaaggaatacggctcgctttcaatcgcggtgcagttttatacagaagccaaaacggtgatgatcgttccgaaaaccgtatttgttcctcagcctaatgtcgattccgcagtcatccgtctgattctccgagacggcccggcagtggacgtggaaaacgaatcctttttctttcagctcatcaaggcaagctttgcacagcgtcgtaaaacgctgctcaataacttagttaacaatctgcctgaaggaaaagcgcaaaaatcaacgattgagcaagtgctcgaagaaacaaatattgacggtaagcgccgaggcgaatccctgtctattgaggagttcgcagcgctgtctaacggattgtataaagcccttttctaaaagggctttttgttttgcgcaccacatggactgccgctacataggctagagaaggacctttcattcaatgataagaaaaaacttggactcagcgaaaaaaggcgctttctcaaggctctttctttcatgatgaggcttagtctatgtgtggagtgaggaatgtgcaatttcaaataggggatatggtagccagaaaatcctatcagatggatgttttgtttcgaattataggaatagagcaaacaagcaaaggaaattcaattgccattttgcatggagatgaagtcaggctgattgctgattcggatttttctgatctggtagcagtgaaaaaagatgagcagatgatgcggaaaaagaaagatgagagcagaatgaatgagtcgctcgaattgctccgccaagattataagctgctcagagaaaagcaggagtactatgcgacaagccaatatcagcatcaggagcattatttccatatgccgggcaaagtgcttcatctggatggcgatgaagcatatctgaaaaaatgcctgaatgtctataaaaaaattggagtgccggtctatggcatccattgccatgaaaagaaaatgtctgcttctattgaagaattgctcgacaaatatcgacctgatatcctggtgatcacagggcatgatgcgtattcgaagcaaaagggcggcattgatgatttgaatgcgtacagacattctaagcactttgttgaaactgttcaaacagcccgaaaaaagatccctcacttagatcagcttgttatttttgcgggggcctgccaatcccattttgaatcactcatcagagcgggtgcgaattttgcgagttcaccgtcaagagtcaatattcatgcgcttgatccggtatatatcgtcgcgaagatcagctttacgccgtttatggaacggattaatgtatgggaagtgctccgtaatacgctgacaagagagaaagggcttggaggtattgaaacaagaggagttctgagaattggtatgccttataagtccaattaacagttgaaaacctgcataggagagctatgcgggttttttattttacataatgatacataatttaccgaaacttgcggaacataattgaggaatcatagaattttgtcaaaataattttattgacaacgtcttattaacgttgatataatttaaattttatttgacaaaaatgggctcgtgttgtacaataaatgtagtgaggtggatgcaatggcgaagacgttgtccgatattaaaagatcgcttgatgggaatttaggtaaaaggctgacgttaaaagcaaacggtggccgccgaaaaacgattgagcgttcgggcattttagctgagacgtacccttctgtttttgtgatacaactagatcaagacgagaactcgtttgaaagagtttcatacagttatgctgatattttgactgagactgttgagctgacatttaatgatgacgccgcaagctcagtggcattttaacgggcagtgaaccttttgtttactgctttttgttttgcccttttttggtttccaataattttaacgaaagttccatctgatttaacaaaagataaaacagtcacatattatcgtgacgtgcacgaatggctatcacttctaaaaaaggggttgtttcgtttgggcagacgtcgtggagttatgtcagatgagtttaaatatgagctggctaaagaccttggtttttatgacacagtaaaaaatggcggctggggcgaaattcgggctcgcgatgccggtaacatggtaaagcgcgctattgaaatcgccgaacagcaaatggctcagaatcagaataaccgataaggatgtgacccgggggacgtgctgttccctggtttttttattttggatataaatacataatgggctgaatatggatatgttcatcctgtacttcaaatgtgatacaatgttcatacttatgtttagatggagaagtaggtgaaagctatgcgtattttagaaaaagcgccagctaagatcaatctgtcacttgacgtcacccgaaaacgcccggatggctatcatgaagtcgaaatgatcatgacgacaattgatttagctgatcgaattgaattgacggagcttgcagaggatgaagtgagggtttcctcccacaaccgatttgtgcctgatgaccaaagaaacttagcttatcaggctgccaagctgatcaaggacagatacaacgtgaaaaagggagtttccatcatgattacgaaggtaattccggtggctgccggtcttgccggcggaagcagtgatgcggcggcgacactcagagggctgaacagactgtggaatttaaatctgtccgcggaaacgcttgctgagcttggagcggaaattggctctgacgtttcattttgtgtctatggcggaactgcattagcaacagggcgcggcgagaaaattaaacatatcagcacgcctccgcactgctgggtcattttagcgaagccgacaatcggtgtttcaactgctgaagtgtacagagcgctgaaactggatggtatagagcatcccgatgtacaaggcatgatcgaggcgatagaagagaagagttttcagaagatgtgcagccgtttaggcaatgtgcttgaatctgttacactcgatatgcatcctgaagttgcaatgatcaaaaaccagatgaaacgctttggtgcagatgccgtgttaatgagcgggagcggcccgacagtgtttggactggttcagtatgagtcgaaggtgcagagaatttataacgggttaagaggcttctgcgatcaagtttatgcggtgagaatgatcggcgaacagaacgctcttgattaaatccgtatgttaagttatattgatcttaaaatattcggattttgggggtaagttcatgaagtttcgtcgcagcggcagattggtggacttaacaaattatttgttaacccatccgcacgagttaataccgctaacctttttctctgagcggtatgaatctgcaaaatcatcgatcagtgaagatttaacaattattaaacaaacctttgaacagcaggggattggtactttgcttactgttcccggggctgccggaggcgttaaatatattccgaaaatgaagcaggctgaagctgaagagtttgtgcagacacttggacagtcgctggcaaatcctgagcgtatccttccgggcggttatgtatatttaacggatatcttaggaaagccatctgtactctccaaggtagggaagctgtttgcttccgtgtttgcagagcgcgaaattgatgttgtcatgaccgttgccacgaaaggcatccctcttgcgtatgcagctgcaagctatttgaatgtgcctgttgtgatcgttcgtaaagacaataaggtaacagagggctccacagtcagcattaattacgtttcaggctcctcaaaccgtattcaaacaatgtcacttgcgaaaagaagcatgaaaacgggttcaaacgtactcattattgatgactttatgaaagcaggcggcacaattaatggtatgattaacctgttggatgagtttaacgcaaatgtggcgggaatcggcgtcttagttgaagccgaaggagtagatgaacgtcttgttgacgaatatatgtcacttcttactctttcaaccatcaacatgaaagagaagtccattgaaattcagaatggcaattttctgcgtttttttaaagacaatcttttaaagaatggagagacagaatcatgacaaaagcagtccacacaaaacatgccccagcggcaatcgggccttattcacaagggattatcgtcaacaatatgttttacagctcaggccaaatccctttgactccttcaggcgaaatggtgaacggcgatattaaggagcagactcatcaagtattcagcaatttaaaggcggttctggaagaagcgggtgcttcttttgaaacagttgtaaaagcaactgtatttatcgcggatatggaacagtttgcggaagtaaacgaagtgtacggacaatactttgacactcacaaaccggcgagatcttgtgttgaagtcgcgagactcccgaaggatgcgttagtcgagatcgaagttattgcactggtgaaataataagaaaagtgattctgggagagcccgggatcacttttttatttaccttatgcccgaaatgaaagctttatgacctaattgtgtaactatatcctattttttcaaaaaatattttaaaaacgagcaggatttcagaaaaaatcgtggaattgatacactaatgcttttatatagggaaaaggtggtgaactactgtggaagttactgacgtaagattacgccgcgtgaataccgatggtcgcatgagagcgattgcatccatcacgctggatcacgaatttgttgtacatgatattcgtgtgattgatggaaacaatggtcttttcgttgcgatgccgagtaaacgcacccctgatggagagttccgcgatattgctcatcctattaattcaagcacgcgaggaaagattcaagatgccgtgttaaatgagtatcatcgtctgggtgacactgaagcattagaattcgaagaagctggagcttcttaaaaaataaccaaaaagcaaggactgctgaaagggctgacataagccttttgccggcggtccttttttaattctgatttttcaaacttagttgcactcaatagaaaattcttgcacttcatgaagtctccttgaaatcagaagatatttaggatatatttttctatggataaaagggatattggaggccaataaatggataagcggtttgcagttgttttagcggctggacaaggaacgagaatgaaatcgaagctttataaagtccttcatccagtttgcggtaagcctatggtagagcacgtcgtggacgaagccttaaaattatctttatcgaagcttgtcacgattgtcggacatggtgcggaagaagtgaaaaagcagcttggtgataaaagcgagtacgcgcttcaagcagaacagcttggcactgctcatgctgtaaaacaggcacagccatttcttgctgacgaaaaaggcgtcacaattgtcatttgcggagatacgccgcttttgacagcagagacgatggaacagatgctgaaagaacatacacaaagagaagcgaaagctacgattttaactgcggttgcagaagatccaaccggatacggccgcattattcgcagcgaaaacggagcggttcaaaaaatcgttgagcataaggacgcctctgaagaagaacgtcttgtaactgagatcaacaccggtacgtattgttttgacaatgaagcactatttcgggctattgatcaggtgtctaatgataatgcccaaggcgagtattatttgccggatgtcatagagattcttaaaaatgaaggcgaaactgttgccgcttaccagactggtaatttccaagaaacgctcggagttaatgatagagttgctctctctcaggcagaacaatttatgaaagagcgcattaataaacggcatatgcaaaatggcgtgacgttgatcgacccgatgaatacgtatatttctcctgacgctgttatcggaagcgatactgtgatttaccctggaactgtgattaaaggtgaggtgcaaatcggagaagatacgattattggccctcatacggagattatgaatagtgccattggcagccgtacggttattaaacaatcggtagtcaatcacagtaaagtggggaatgatgtaaatataggaccttttgctcacatcagacctgattctgtcatcgggaatgaagtgaagatcgggaattttgtagaaattaaaaagactcaattcggagaccgaagcaaggcatctcatctaagctatgtcggcgatgctgaggtaggcactgatgtaaacctgggctgcggttcaattactgtcaattatgatggaaagaataagtatttgacaaaaattgaagatggcgcgtttatcggctgcaattccaacttggttgcccctgtcacagtcggagaaggcgcttatgtggcggcaggttcaactgttacggaagatgtacctggaaaagcacttgctattgccagagcgagacaagtaaataaagacgattatgtgaaaaatattcataaaaaataatcctaaattcggaggtttatccatgtctaatcaatacggagataagaatttaaagattttttctttgaattcgaatccagagcttgcaaaagaaatcgcagatatagttggagttcaattagggaaatgttctgtcacaagatttagtgacggggaagtccaaattaatatcgaagaaagtattcgcggatgtgattgttacatcatccagtctacaagtgaccccgttaacgagcatattatggaactgctgattatggtagatgcgttaaaacgcgcttctgcaaaaacgattaacattgttattccttattacggttatgcgcgtcaagacagaaaagcaagatcccgtgagccaatcacagctaaacttttcgctaacctgcttgaaacagccggtgcgactcgtgtgattgcacttgacctgcatgcgccgcaaattcaaggattctttgatataccgattgaccacttaatgggtgttccgattttaggagaatattttgaaggcaaaaatcttgaagatatcgtcattgtttcacctgaccatggcggtgtgacacgtgcccgcaaactggctgaccgactaaaagcgccaattgcgattattgataaacgccgtccgcgtccaaacgtggcggaagtcatgaatattgtaggtaacatcgaagggaagactgctatcctcatcgatgacattattgatactgcaggtacgattacacttgctgctaatgcgctcgttgaaaacggagcgaaagaagtatatgcatgctgtacacaccctgtactatcaggccctgcggtagaacggattaataattcaacaattaaagagcttgttgtgacaaacagcatcaagcttcctgaagaaaagaaaattgaacgctttaagcagctttcagtcggaccgcttctggcagaagcaattattcgcgttcatgagcagcaatcagtcagctaccttttcagctaaaccgattttgaaaggtttaaacctttatcgttttgggtattgtttgtaataggacaactaaaacgacaataggatggtgctgaatatggcaactttaacggcaaaagaaagaacggactttactcgttcgtctcttcggaatatccgtacttcaggacatgttccaggtatcatatatgggaaggatacgggtaacaaacctgtgtcattagacagtgtggagctcatcaaaacgctgagggacgaaggcaaaaatgcagtcattacgcttgaggtcagcggagaaaaacactcagtcatggtaacagacctgcagacggacccgctgaaaaatgaaatcactcatgctgattttcaagtagttaatatgagtgaggacattgaagtggaagttccgattcatctgaccggagaagccattggagtgaaaaacggaggcgtactgcagcagccgttatatgcacttactgtaaaggccaagccaaaagccattccgcaaacgattgaggctgatatttcaagcctcgatgtaaatgaagtactgacgattgcagatttgcctgctggcggtgactactcctttaatcatgaatcagatgaggttgtggcttcaatccttcctccgcagcagcaggaagcagctgaggtcgatgaagaggaatctgccgatgctcagccagaaggtgaaaacgaacaataatagcttaaggcgtaaccctcccgcggttacgtcttttgtgctagaatgagaagaattatagcccgtttatgaagacgggagttatgtgactaagggaggattcgccatgcttgtgattgccggtctcggaaacccggggaagaactatgaaaacacacggcataatgtcggatttatggtgatagatcagcttgcaaaggaatggaatatagagctgaatcaaaataaatttaacggattatacggaaccggatttgtttccggcaaaaaggttctacttgttaaaccgcttacatatatgaatttatcaggagaatgtttgcggcctttaatggactactatgatgtcgataacgaagatttgacagtcatttacgacgaccttgaccttccgactggcaagatccgtttaagaacgaaaggaagcgccggagggcacaatggcatcaaatcactgatccagcatcttggaacatccgagtttgaccgtatccgcatcggaatcggccggcctgtaaacggcatgaaggtcgttgattatgtgttaggctcctttaccaaggaggaggcacctgagatcgaagaagcggttgataaatctgtgaaggcttgtgaggcttctttgagtaaaccgtttttagaagtcatgaacgaatttaacgcaaaggtataaaatgtaacaacaaagtccatactacaccaaaatgactttttcatcaggaggtcccttgtatggctttgcattattattgtcgtcattgcggagtgaaagtaggcagtctcgaatcttcaatggtatcgacagactcacttggatttcagcacttaacaaatgaggaaagaaacgatatgatttcttataaagaaaatggagatgtccatgttttgacgatatgtgaagactgccaagaggcgcttgaccgaaatccgcattaccacgaatatcacacatttattcaataaaaagctttggtgtagacactagaccaaagcgtttttctgttctcgcaggaaacagagaggaggggccatatggacaacattcaaacctttataaaagaaagcgatgactttaaatccatcatcaacggtttacacgagggcctgaaggaacagctgctcgcgggtctgtcgggttccgcgcgttctgtttttacttctgctctggctaatgaaacgaataagcctatctttctcatcacccataacttatatcaagcccagaaagtaacagatgatctgacttcacttctagaggatcggtctgtccttttgtaccccgtcaatgaactcatttcatcagaaatcgcagttgcaagccctgaattgcgggcgcagcgattagaagtcattaatagactaacgaatggagaagcgccaattgtcgttgctccggtagctgcaatcagaagaatgctgccgcctgttgaggtgtggaaaagcagccagatgctcattcaagtaggccatgatattgaacctgaccagcttgcctcacggctggtagaggtagggtatgagcggtctgatatggtttctgcgcccggggaattcagtattcgcgggggaatcattgacatttatccgttgacttcagagaatccggtgagaattgaactttttgacaccgaggtggattcaatccgcagctttaattcagatgatcagcggtcaattgagacccttacctcgatcaatatcggtcccgcgaaggaattaattatcagaccggaagaaaaagcgcgggcgatggagaaaatcgatagtggtcttgccgcgagcttgaaaaaattaaaggctgacaaacaaaaagaaatacttcatgcgaatatttctcacgataaagaacgcttgtctgaaggccagacagatcaggagctcgtgaagtatctctcatatttctatgaaaagcctgctagtttactagattatacacctgataatacacttctgattttggatgaagtcagtcggattcatgagatggaagaacagcttcaaaaagaagaagcggagtttataacaaatcttcttgaggaagggaagattttgcatgacattcgtttgtcattcagcttccaaaaaatagtggttgagcaaaaacggcctctgctgtactactctttatttttgcggcatgtacaccatacgagcccgcaaaatatcgtcaatgtgtcaggccggcaaatgcagagtttccatggccaaatgaacgtgcttgcgggcgaaatggagcgttttaaaaaatcaaatttcactgttgtgttcttaggagcaaacaaggaacgtacacagaaattgtcatctgttttggctgattatgatatcgaggctgccatgacagacagcaaaaaagcgcttgttcagggacaggtctatatcatggaaggcgagctccaatcgggatttgagctgccgttaatgaagcttgccgttattacggaagaagaactgttcaaaaaccgtgtaaagaagaagccgcgaaaacagaagcttaccaatgcagagcgcatcaaaagctattctgagcttcaaattggagattatgtcgttcatattaatcacgggatcggaaaatacctggggatcgaaactcttgaaatcaacggcattcataaagactatttaaatatacattatcagggcagtgacaagctttacgtccctgtagaacaaattgatcaggtccaaaaatatgttggctccgaaggaaaagagccaaagctgtataaattaggcggaagtgaatggaagcgggtcaagaaaaaagtagagacatccgttcaggatattgctgacgacttaattaagctgtatgccgaaagagaagcgagcaagggctatgcgttttctcctgaccatgagatgcagcgtgaattcgaatcggctttcccttatcaagagactgaggatcagctccgttcgattcacgaaatcaaaaaagacatggaaagagaacgtccgatggaccgcttgctgtgcggagatgtgggctacggtaaaacagaggttgccatacgtgccgcgtttaaggcgatcggtgacggaaagcaggtagctctgctcgttccgacaacaattttggcacagcagcactatgaaaccataaaagagcgcttccaggactatccgattaatatcggccttctcagcaggttcagaacgcgaaaagaagcaaacgaaacaatcaaagggctgaaaaacggaacggttgatatcgtcatcgggacgcatcggctgctatcaaaggatgtcgtgtataaagacttagggctcctcatcattgatgaagagcagcgtttcggtgtaacccataaagaaaagatcaagcaaataaaagccaatgttgatgtattaacgttaacagcaacaccgattccgcgtacgctgcatatgtctatgcttggcgtaagggacctttcagtcatcgagactccgccggaaaatcgcttccccgtacagacgtatgttgtggaatataacggcgctcttgtcagagaggcgattgaacgtgagcttgcacgcggaggccaggtctatttcttgtacaaccgggtagaggacattgagcggaaagcggatgaaatttcaatgctagtccctgacgcgaaggtagcatatgcgcatgggaaaatgacagaaaatgaattagaaaccgttatgctaagttttcttgaaggagaatcagacgttctcgtcagcacaaccattatcgaaactggcgtggacatcccgaacgtcaatacgctgatcgtatttgacgccgacaagatgggactttctcagctttaccagctgcgggggcgtgtcggccgttctaaccgtgtggcgtatgcgtacttcacgtatcgccgggataaagtgctgacagaagtggctgaaaaaaggctgcaggctattaaagaattcacagagctaggttccggttttaaaatcgcaatgcgtgacttaacgattcgcggagctgggaatcttcttggtgcccagcagcatggcttcatcgattcggtcggatttgacctctattcacaaatgctgaaggaggccattgaggagcgtaaaggagacacagcgaagacagagcagtttgaaacagaaattgatgtcgagcttgatgcgtatattccggaaacttatattcaagacggcaaacagaaaattgatatgtataaacgcttcaggtctgtggcgacaatcgaagagatgaatgagcttcaagatgaaatgatcgaccgctttggaaactatccaaaagaagtcgaatacttgtttactgttgcagaaatgaaagtctatgcgagacaggaacgtgtcgagctgattaagcaggataaagatgctgtcagattgacgatttctgaagaagcaagtgctgaaattgacgggcagaagctgtttgagcttggcaatcaatatggcagacaaatcggactgggaatggaagggaaaaaactcaaaatctccatacagacgaaaggccgtagtgctgatgaatggctcgacaccgtgctgggcatgctgaagggcttaaaagatgtgaaaaagcaaaccatttcatcaacgtaaattttgttactctctggtgtatattacatttgatgtgacggatactaatttcaagcgaggcggaaggtacataaagtaactgctttaggtctttcccacatgtatataccatcaaatgaaagagaggcaccagagatgaaagcaaccggtatcgtacgtcgtattgatgacttaggtcgggtcgtgattcctaaagaaattcgaagaactctgagaatcagggaaggcgatccgcttgagatttttgtagatcgtgacggagaagtgattttgaaaaagtactctccgatcagtgagcttggagactttgcaaaggagtatgcagacgcgctttacgacagcctcggccattcagtgctgatttgtgatcgtgatgtgtatattgccgtgtccggcagctccaaaaaagattacttaaacaagtcaatcagcgaaatgctggaaagaacaatggatcagcgcagctccgtgcttgagagtgatgcgaaatcagtacagcttgtgaatggaattgatgaggacatgaattcttatactgtcggcccaattgtggcgaacggtgatccgataggtgctgtggtgatcttttcaaaagatcagacaatgggcgaagtagagcataaagccgttgaaacagcagctggatttttggctcgtcaaatggaacagtaggtcttattcctttcttcgaaaataggtatgtaaagaacagctctccttgggacgctgttctttttcatgcgtgccgaaaaaggaatccaagggttgggatgtggtataataacctcgtttttatttgtgccgcggtaatacgtgaaccgtattgcccctgacgttgggaaggagcttttggatggacgattcaataggcgttaaacggcattggatttggcagggggcttttgttttaattctggcaggcatcatcacaaaaattttaagcgctgtttacagagtcccgtttcaaaacattgtcggcgatgttggattttatatatatcagcaggtatatccctttcttggtattgcggtcatgctgtccacatcaggatttccagtcattatttcaaagctgatgaatgattatagtgaaaaaaatcatcacaccatattaaaaatatcagcgttgtttttgtctttaatcggtattttattatttctttgtttatatctgggtgctgttcctattgcactctttatgggagattcgcatctagccgtgttaattcaagtggccgcatacgcgtttctgctgttcccatttgtcgcgttgcttagaggcggttttcaggggcggcacgaaatgctcccttcagccttatcacagatgacagagcagtttctgcgtgttgcggtgctcttgggtttatcattttggctcgtgaaaaagggagcctcgctttatactgcgggagcggcagccgcttcaggctctcttgccggaagtttggttgcattgataatactgggttttttttggttcaaaacgaaaagagacaaccaaacggataggcaaaacgaaaatgtcatcacaacaaaagaattgacgaaaaaactgcttttatattcggttacaatttgtgtaagcagtttgctgcttttgtttatccagctcgttgatgctttgaatttatatgcattgctttcgggtggtgaggcaagcgaagaagcaaaacgcttaaaggggatctatgatcggggacaacccttgctgcagctcggctcagtttttgccgtaagcattgcgacgtcactcgttccgtatatttctatggctgtaaaaaacaaagagctgaagatcatgaaagaaaaaatcacgtcatctttgaaactatgccttgtgctcggtacaggcgcatcggctgggttgatttgcattcttaagccggttaatatcatgctgtttcaaaatggagaagggacaggtgcgttacaagtatttagctgctccattttgtttgcatccttggcggtaacggcagcggcagtcttacagggagcggggtacacagtttttcctgcgatagcggtgggcgcgggtgttgcagtgaaatgggtgttaaacacacttttggttccgcgctatgggattgaaggcgcatcgcttgcgacagctgcttcctttgcggctgtcgccggccttaacttgtatcagcttcggcaaaaggaatggctcgataagcttagaggcgttttgattccgattattggatctgctcttttgatgtcagctgttttgcttgcgtatacgcgtctctggactttcttgtttcctgcaacaggaagaggagcggctgtgattgagagtctttctgctgttgccattggtggcgcggtgtttatttattgtatgatgagattgggaatatttacagatgaagagctgaacagtgtgccattcggcagcaagttaagcaaattcatgagaaggagagaacaaaatggcgggtaaaattacagtcgtcggacttggtgccggagacatggaccaattgacaattggtatacacaagctgctgacgaaggcagatacgctgtatgtcagaaccaaggatcatcctttaattgaggagcttgaaaaagaaacgaagaacatccgtttctttgatgatatatatgagaaacatgatcagttcgaggcggtatatgaagaaattgcagatatcctctttgaagcggcgcggcgtgaggacgtggtttacgctgtgccgggacacccttttgtcgcagaaaaaacagttcagctgctgacggagcggcaggaaaaggaaaacgttcaagtgaaagtcgcggggggacaaagtttccttgatgccacattcaatgccttgcaaattgacccgattgaaggttttcaatttgtggatgccggcacattgtccgcggatgagcttgagctcagacatcatctgatcatatgtcaggtttacgaccaaatgacggcttctgaagtcaagctgacattgatggagaagctgcctgatgattatgaggtcgtcattgtgactgcagcaggcagccgtggcgaggagatcaggacagtgccattatttgagctggaccgcaatgtcgctttgaacaacttaacaagtgtgtatattccgccgattaaagaagagaagctgctttatcacgaattctccacgttccgaagcatcatcagagagcttcgcggacctaatggatgtccgtgggataaaaagcagacgcatcagtcattaaagcagtacatgattgaagaatgttatgagcttctcgaagctattgacgaagaagacacagaccatatgatcgaagagcttggcgacgttttgcttcaggtcttgcttcacgcgcaaattggtgaagatgaaggttatttcacaattgatgatgtcataaaaggaatcagtgaaaaaatggtccgaagacatccccatgtgtttaaagatgttaaggttcaggatgaaaacgatgttttagccaattgggaagatataaaaaaggccgaaaaaaatacatctgaatcatcattactagacagcgtaccgaaaacccttccagctctttcgaaagcagctaaattgcagaaaaaagcagcgaaggtcggttttgactgggaagacgtcagcgatatttgggaaaaggtaagtgaggaaatgaaggaattttcttctgaggtttctgaagctcctcacgaacacaatcttaaagctgagtttggcgacattttgttcgcgctggtgaatgtagcccgcttctacaaaatagagccagaggaagcgctgaccatgactaatgacaaattccggagacggttctcgtacattgaggaaacagcgaaggaagagggagtcgagttggctgatatgtcccttgaggacatggacaaactgtggaatgaagcaaaagaaactgagaggagatcatagatatgagattagataaatttttgaaagtatcacggctgatcaaacggcgtacactagcgaaggaagtagctgaccaaggacgaatctctattaacggaaaccaagctaaagctagctctgacgtaaaaccgggagatgaactaacggtccgcttcggccaaaagcttgtaacggttcaagttaatgaattgaaagacacgacgaaaaaagaagaagctgcaaacatgtacacgattctaaaagaagaaaaactcggcgaataggcttgttctaaaaaaatcccccacctcatacaatgcagtaataatgctaaaagtatcgaggatatgggggctgaatagatgaattcatattatgatcaaaaaggttcttcgtctgttccggaacagcatgatgtgacaatgaaaggccggaagcatttagatatttctggggttaagcatgtggagagttttgataacgaagaattcctgctggaaacggtgatgggaatgctctccgtcagaggccaaaacctgcagatgaaaaatcttgatgtggaaaaagggattgtttcgattaaaggcagggtatttgatttagtgtacttagacgaacaacaaggggataaagctaaagggttttttagcaagttgtttaaatgacgctgacgacacaattctatacaatgctagcgatgtccggtatgggtctctggcttggtgcttcgcttgatacataccggctctttgtcattcgtgccaaaacagccagatggctattatttattcatgatattcttttctggattgtgcaagggctgcttttcttttatgtcttgcttcatgtaaatgagggagaattcaggatttacatctttttagcggttctgctgggcgttgcgacgtatcagagcctttgcaaacgaatctatataaaaatactgaaattcgtcatttaccttgttgcttctgtttatcaattcttcaaaaaactcattcagcacgtgttatttcgtcctattgtgtggacatgcggagcgatcatctggctggcggcatttttattcaagaaaacatacagcctgataggttttctcctgctgtgtctatataaaatagtcatggttctgtgttttccgatccgttttatcgcgaaacaatgtttgaaacttcttcctgtgaaaatgcgtctaacttttagacgttattttgaaaaaggtgcaggatttctcaaaaagaagaagaaactattgataaccataagaacgaccattacacggtttttgaagaaatgaaaggaggaccgtctggtttgaatttttccagggaacgaacgataactgaaatacaaaacgactataaagaacaagtagaacggcaaaatcagctgaagaaacgaagacgcaaagggctgtacagacggttaactgtattcggcgccctagtattcctgacggcaattgtgctggcaagctctgtatggtcccaaacatcttcccttagtgcaaaagaagaaaagaaagaacagcttgaaaaagaactgaaaagtttaaagacaaaacaaacggatttaaaagaagaaatatccaaattgaaggatgaggattacgtcacagagcttgccagaagggacttattcatgtctggagacggagaaattatcttcaatgtggagaagaagagcaagtagccttgttgacacttaaatttttatttaggtataattaagcaaacgatctttttataagcctaaggaggagcactttttttatgtcgattgaagttggcagcaagttgcaagggaaaattacaggtattacaaattttggagcatttgttgaattgcctggaggctcaaccggtctcgttcacattagtgaggtagctgataattatgtcaaagacattaacgaccacttaaaagtcggcgaccaagttgaagtgaaagtcatcaacgttgaaaaagacgggaaaattggtttatctattaaaaaagctaaagaccgtccgcaagccagacctagaaatgatttccgtccgaaagaatcttttgaacagaaaatgaataagtttttaaaagacagcgaagatcgcttgtcatctttaaaacgcaatacggaatcaaaacgtggagggcgcggagcaagaagaggataacttgctgctttctataaaataaatgaagcatccgttcatcccgacggatgcttttttattatcctcatcctctttaagagtcagaaaattacaacattaaagtttctgttgacgaaagagacaaacctttgtattatataacttgtgcttagaagcacaaaacaatatggcggtgtagctcagctggctagagcgtacggttcatacccgtgaggtcgggggttcgatcccctccgccgctaccatatttgtttggcccgttggtcaagcggttaagacaccgccctttcacggcggtaacacgggttcgaatcccgtacgggtcatcctaaaaaatcggtttctcttgcagaagccgatttttttcatttttagacaacattccggaaattcttttcataaacgaatatcaaggcagaaaccgtcgaagatttctttggtattgttaccttcttttgacaaaatcctatctgtgctttcgctataatgacaggcaacgaatataacaggtgggagatgagaggaatggaaaaagcagaaagaagagtgaacgggccaatggcgggacaagctttggaaaaactccaatcgttttttaacaggggcacgaagctggtgactcatcatttgcattcactgtttttctataaaggattcatttatgttgttatcggatttttgcttggacgggctttcatattatccgaggtgcttcctttcgcacttcctttctttggagcgatgcttctcatcagaagagacaaagcgttttatgcggttttggctgtgcttgcaggtgcgctgaccatatctccaaagcactcattgctcatactggcggcattgctggcattcttcgtattttctaaagtggctgccttcattaccgacgatcgtgttaaagcactcccgattgtcgtgttcttctcgatggctgcagcaagagccgggtttgtttatgcccaaaatggcgtatttacaacctatgattatgtaatggctatcgttgaggctggactgtcgtttatcttaacactgattttccttcagagccttccgatttttactgtgaaaaaagtgaaacaatcattaaaaatagaggaaattatctgctttatgattcttattgcctctgttttaacggggctggctggcttgtcctaccaagggatgcaggcagaacatatattggctcgttatgttgtgttgagtttttcctttattggcggagcaagcatcggctgtacggttggtgttgtgaccggcctgattcttggcttggcgaatatcggaaacctatatcaaatgagtctgcttgctttttccggtttattgggcggtttgctgaaggaaggaaaaaaagcgggtgcagcaatcggtctgatcgttggttcacttcttatatctttatatggtgaaggctctgccggtctgatgacaacgctctatgagtcattaatcgcagtcggcctgtttttgctcacacctcaatctattacaaggaaagtggcgagatatattccgggaactgtcgagcatcttcaagagcaacagcaatacgctagaaaaatccgtgatgtcactgctcagaaggtagaccagttctccaatgtatttcacgcgctgtctgaaagctttgcaaccttttaccaagcgtcagacgaacagacagatgacagcgaagttgatctgttcttaagcaaaatcacggagcattcctgtcagacgtgctacaagaaaaacaggtgctgggtacagaactttgataaaacatatgatttaatgaaacaagttatgcttgaaacagaggaaaaagaatatgcatcaaaccgaaggctaaaaaaagagtttcaacagcattgttctaaatccaagcaggttgaagagctgattgaggatgagctcgcacatcatcatgcccatttgacactcaagaaaaaagtccaagacagcaggcgccttgttgctgaacagcttttaggtgtttctgaggttatggccgacttttctcgggaaataaaaagagagcgagaacagcactttctgcaggaagagcaaatcatagaagcgcttcagcatttcggaattgagattcagcatgtcgagatctatagccttgaacaaggaaatatcgatattgaaatgaccattccgttcagcggacatggagaaagtgaaaaaatcattgcccctatgctgtctgacattctggaagaacaaattcttgtgaaagctgaacagcactctccgcatccgaatggatacagccatgtcgcctttggatcaacaaaatcatacagggtgtccacgggagctgctcacgctgcgaagggcggcggccttgtctccggcgacagctacagcatgatggagcttggagccagaaaatatgctgcagcaatcagtgacggaatgggcaatggcgcaagagcgcactttgaaagcaatgaaacgatcaagcttcttgaaaaaatccttgaatcgggaattgatgaaaaaatagcaattaaaacgatcaacagcatactgtctctaaggacaactgacgaaatatattccacgcttgacctatctattatcgatcttcaagatgccagctgtaaatttttgaaggttggatcgacgcctagctttatcaaacggggtgaccaggtcatgaaagttcaagcgagcaatctgccaatcggtattattaatgaatttgatgtggaggttgtgagtgaacagctgaaagctggtgacctcttaattatgatgagtgatggcatttttgaggggcctaagcatgtggaaaatcacgacttatggatgaagcgtaaaatgaaagggttgaaaacaaatgacccgcaggagattgcagatttgcttatggaagaagtcatccgcacaagatccggccaaattgaggacgatatgactgttgttgttgtccggattgatcacaatacaccgaagtgggcatccattcctgttccggcaatctttcaaaacaaacaagaaatttcataacgcttccgtataaatcaaatttcttctggcgaagatgggaatatatgaatctgagaatcctcgtattctccaggaggaatgaatgtgaacaacggacatttaaatcaaattttgctgataacggatggctgctcaaaccatggggaagacccgcttgcaatggctgcttttgctaaagagcaggggattacggtaaatgtcattggtataatggaagaaaatcaaattgaccctgaggcaatgaaggaagtcgaagggattgcacttgccggaggaggtgtgcaccaagtcgtttatgcatctcagctttcacaaactgttcaaatggtaacaaagaaagcgatgacgcaaaccttacaaggtgtagtcaatcaagaactgaaacagattctcggaaagaatgtggaaatggaagagctttctccggaaaaacgcggcgaagtcatggaagtggtagacgagcttggagaaacggtgcatcttcaggttttggttcttgttgatacaagtgcaagtatggcgccaaagcttccaacagtaaaagaggcgctgattgatttgtctgtaagcctcaattcccgaatcgggaataacgaatttgcgatgtgtatatttcccgggaaaaaacaagaggtcgagcttgtgctgaactggacaccgaagctgcaatctctttccacactctttgcaaagctttcgacaggcggcatcacgccgacaggtccggcgattcgtgaagcgacactgcagtttgaaaaaatacgctcaagaaggggcatgctggcagatgatgaacgacgctttgacgagtttggcatgtagcctcaagccgggtacgacaatcaaaggcaagtggaatggaaacacttatacattgcgtaaacagcttggtaaaggggccaatggaattgtgtatttggcagaagcatcagatggacatgttgccttaaaggtgagtgatgacagcctgtctattacttctgaagtgaatgtcttgaaatctttctcaaaggcccagtccgttacgatggggccttctttttttgatacggatgatgcctatattcccagtaccaatacgaaagtttcattttatgcaatggaatacataaaagggccgctgcttttgaagtatgtcagtgataaaggagcagagtggatacctgtattaatgattcagctgttatccagcttatcggtgcttcaccagcaaggatggatattcggcgatcttaaacctgataatctgatcgtaactggtccgcccgcaaggatccgctgcattgatgtgggcggcacgacaaaggaaggccgggcgataaaagagtatacggagttttatgacagaggctattgggggtatggaacaagaaaggcagagccatcctatgatctgttcgcagttgccatgattatgatcaacagtgtgcataaaaaagaatttaagaaaacgaaccagcccaaagaacagcttaggtctctcatcgaaggaaaccctctgcttcaaaagtataaaaaagtgcttttttcaaccttgaacggagattatcaatccgcagatgaaatgaaaaaggatatgctagacgcggggcaaaaagcagcacaaagaaaacagcctataaaagcatcaccgcagcctgccacacgacatagacagcaaaaaccgcgccaaggaaaaataacgaagacgcgatataccccaaaacagaaaccggctaagtcgggggggttatttgaaacaacgctgatcgtgatcagtgttttagcgctttatttcgcctatattatctttttcttaatctgaatggtgcaaactgcagagcctatgcttcttctttgcttggaggggttgaaagtgttaggatatgaatatctttaaaatacctgctcattgtgaggaggacattgtgaaaagtgtcaaagattttttaaacaaacacaatcttacgttaaaaggggcgacgatcattgtaggcgtttctggcggtccggactcaatggctcttcttcacgcgttgcatacgttatgcggccgttcagcgaatgttattgcagctcacgttgaccatcggttcagaggtgcggaatccgaggaggacatgcgttttgtccaagcttattgtaaagctgaacagctcgtgtgcgaaacggctcaaatcaatgtaaccgcatatgcacaggaaaaaggactcaataagcaggctgcagcacgcgattgccgctaccagttttttgaggaaatcatgtcgaagcaccaagcggactatctggctcttgcgcatcatggtgatgaccaggttgaaacaatgcttatgaaactggctaagggtacgcttggaacgggacttgcgggaatgcagccggttagacgttttgggacggggcggatcatcaggccgttcttaaccattacaaaggaagagatccttcactattgccgtgaaaacggcttgagctaccggacggatgaaagcaacgccaaagatgactacacaagaaacagattcagaagaacagtgctcccgtttttgaagcaggaatctccggatgtgcataaaaggtttcagaaagtgagtgaagcactgacggaagatgagcaattcttacagtcattaacgaaagatgaaatgaataaagtaatcacaagccagtctaatacatcagttgaaatcaattcctctcaattgcttgccctcccgatgcctttacaaagaagaggagttcaactaatattaaactatctttatgaaaacgttccatcatccttttcagcccatcacattcagcagtttctcgattgggcggaaaatggcagtccttcaggagtactggactttccgaaaggactgaaggtggtcaaatcatatcagacatgtttgtttacatttgaacaatggcagtgcaaaaatgttccctttgaataccaaattagcggagcttctgatgaaacggcagtgctccctaatggatatctgatagaggcaaggcattatgcggactcgcctgaagaacatgggaatgctgtttttatcacaagtgaaaaaaaggtgcgatttcccttaacaatccggacgagaaaagctggagaccggatcaaactaaaagggatgaacggctcaaaaaaggtaaaggatatatttattgataagaaactgcctctccaagaaagagacaactggccgattgtgacggacgcaagcggtgaaattatctggatacctggcttgaaaaaatcaatttttgaagatcttgtgattccaaacagcgaccgcattgtattacaatatagacagcatgaaaagtgtagggggcaagcaaaatcatgatgaaacatgatatcgagaaagtactgatctcagaggaagagatacaaaagaaagtaaaagagttaggtgcagaattaacgagcgagtatcaagatacatttccgttggcaatcggtgtgttaaaaggagcacttccttttatggcggatcttatcaagcatattgatacatatttggaaatggatttcatggatgtatcaagctacggaaattctacggtttcttctggagaagtaaaaatcattaaagatttggatacatctgtagagggccgggacatcttaattattgaagatatcatcgacagtgggttaaccttaagttatctcgtagagctcttccgataccgtaaagcaaaatcaattaagattgttacccttttggataaaccgagcggaagaaaagcggacatcaaagcagactttgtcggttttgaagttcctgacgcgtttgtagtgggttacggacttgattatgctgagcgctatcgcaatctgccttatatcggagtgttaaaaccggcagtttatgaaagctgatcggcagcctgcttccgagatggttattgtttgtattggaatgattttctatggtactattgaacatagttgtgcttactgtgggaggaggtaaggaatgaatcgggtcttccgtaataccattttttatttacttattttattagtagtaatcggggttgtgagctacttccagacctcaaatccgaaaacagaaaatatgtcgtacagtacgttcatcaaaaacctggatgacgggaaagttgatagcgtatcggttcagcctgtcagaggtgtttatgaggtaaaagggcagctgaaaaactacgacaaagatcaatactttttgactcatgttcctgaaggaaagggagcagaccagatatttaacgctttgaaaaagacagacgtaaaggttgagcccgcgcaagaaacaagcggatgggtgacgttcctgacgaccatcatcccatttgtcattatctttattctgtttttcttcctgctcaatcaggctcaaggcggcggcagccgtgtcatgaactttggcaagagtaaagcgaagctgtatacagaggaaaagaaacgcgtcaaatttaaagacgttgcaggggcagacgaagaaaagcaagaacttgttgaagttgttgagtttctgaaagatccccgcaagtttgccgagctcggcgccagaataccgaaaggcgtgcttttagtcgggcctccgggtaccggtaaaacattgcttgccaaggcttgtgcgggagaagccggcgtacctttcttcagcatcagcggatctgatttcgttgaaatgtttgtaggggtcggtgcttcccgtgtgcgtgacttgtttgaaaatgcgaaaaagaatgcgccttgtttgatcttcattgatgaaattgacgcagtcggacgccagcgtggcgctggtctcggcggtggacacgatgaacgtgaacagacgctaaaccaattgcttgttgaaatggacggattcagcgctaatgaaggaattatcatcattgctgcgacgaaccgtgcggacatcttggacccagccttacttcgtccgggacgttttgaccgtcaaatcacagtggaccgcccagatgtcattggccgtgaagctgtattgaaagtccatgcgagaaacaaaccgctggatgaaacggttaacctaaaatcaattgccatgagaacaccaggcttctcgggcgctgacttagaaaacctcttgaatgaagctgcgcttgtagcagctcgtcaaaacaagaaaaaaatcgatgcgcgtgatattgacgaagcgacggaccgtgtaattgccggacccgctaagaagagccgcgttatctccaagaaagaacgcaatatcgtggcttatcacgaaggcggacacaccgttatcggtctcgttttagatgaggcagatatggttcataaagtaacgattgttcctcggggccaggctggcggttatgctgttatgctcccaagagaagaccgttatttccaaacaaagccggagctgcttgataaaattgtcggcctcttgggcggacgtgttgctgaagagattatcttcggtgaagtcagcacaggggcgcacaatgacttccagcgtgcgacgaatattgcaagacgaatggttacggaattcggtatgtcagaaaaactgggaccgttgcaatttggacagtctcagggcggtcaggtattcttaggccgtgatttcaacaacgaacagaactacagtgatcaaatcgcttacgaaattgatcaggaaattcagcgcatcatcaaagaatgttatgagcgtgcgaaacaaatcctgactgaaaatcgtgacaagcttgaattgattgcccaaacgcttctgaaagttgaaacacttgacgctgaacaaatcaaacaccttgtcgatcatggaacattacctgagcgtaatttctcagaagatgaaaagaacgatgatgtgaaagtaaacattctgacaaaaacagaagaaaagaaagacgatacgaaagagtaattcgctttctttctaaataaactgccggctgacgctggcagtttttttatgtaaatgatgggctcagctgcggcttttacaatcatccaaatctggtatcgatttgtttacaaatgagccgctgatcgtgtatggtattgtagaatgtttgtaaaagtaaagtagagaaactattcaaaagtggtgatagaggttgttactggttatcgatgtggggaacaccaatactgtacttggtgtatatcatgatggaaaattagaatatcactggcgtatagaaacaagcaggcataaaacagaagatgagtttgggatgattttgcgctccttatttgatcactccgggcttatgtttgaacagatagatggcattattatttcgtcagtagtgccgccaatcatgtttgcgttagaaagaatgtgcacaaaatactttcatatcgagccgcaaattgttggtccaggtatgaaaaccggtttaaatataaaatatgacaatccgaaagaagtgggggcagacagaatcgtaaatgctgtcgctgcgatacacttatacggcaatccattaattgttgtcgatttcggaaccgccacaacgtactgctatattgatgaaaacaaacaatacatgggcggggcgattgcccctgggattacaatttcgacagaggcgctttactcgcgtgcagcaaagcttccgcgtatcgaaatcacccggcccgacaatattatcggaaaaaacactgttagcgcgatgcaatctgggattttatttggctatgtcggccaagtggaaggaatcgttaagcgaatgaaatggcaggcaaaacaggaaccaaaggtcattgcgacaggaggcctggcgccgctcattgcgaacgaatcagattgtatagacatcgttgatccattcttaaccctaaaagggctggaattgatttatgaaagaaaccgcgtaggaagtgtataggaggtttagtaatggattatttagtaaaagcacttgcgtatgacggaaaagttcgggcttatgcggcgagaacgactgatatggtaaatgaggggcagagacgccatggtacgtggccgacagcatccgctgcattgggccgcacaatgacagcttcacttatgctcggcgctatgctgaagggcgatgataagctgaccgtgaaaatcgagggcggaggtccaatcggagctattgtagctgatgccaatgccaaaggagaagtcagagcctatgtctctaacccgcaagttcattttgatttaaatgaacaaggaaagcttgatgtcagacgtgcggttggaacaaacggaacgttaagtgtcgtaaaagatttaggtttgcgcgagttcttcacaggacaagtagaaatcgtttcaggagaattaggagatgatttcacttactatcttgtatcatctgagcaggttccttcatcagtgggcgtaggtgtgctcgtgaatcctgacaataccattcttgcggcagggggctttattattcagctgatgccgggaacagatgatgaaacaatcacaaaaattgaacagcgtctatctcaagtagagccgatttctaagctcatccaaaaagggctgacaccagaagaaattttagaagaagtcctaggcgagaaacctgagattttggaaacgatgcctgtcagattccattgcccttgttcaaaagaacggttcgaaacagccattttaggactaggcaaaaaagaaattcaagatatgatagaagaagatggacaagccgaagcagtatgccatttttgtaatgaaaagtacttatttacaaaagaagagctggaagagcttcgtgaccaaactacccgctaagctctttagcgggtttttaatttgagaaaaggggctgaaagcaggtttgaaatcaagaacaatctggaccattattttaggggcgctgttggtttgctgtattgctgttgcatatacgctgacgaaatcccaagctggcgcatcgtcatccggtgagtctattgcgactatcggaggcaagagtgtgacaagagaagaatggctgaaagaaatggaagatcagtatggtaagtcaacgcttgaagatatgatcaatgtccgagttgttgagcagctggctaaaaagaacaaccttaaaatatccaaaagcgaagttgatcgtgagtttttgctgattaaagcggtcaataattccttttacgaagatgaacatacgacggagaaagagtggaaagaccaaattcgttataatatcctccttgaggaattgttaacaagggatatcgatatctcaaacaaagaattggaatcattctataataaaaataaggaactatatcagtttgatgattcgtatcgaattcggcacattgttgtaaaagatgaagaagaagcgagagaagtcctgaaagaactgaaaggcggatcaagctttgaagctgtcgctgccgaaagatctacagacagatatacatcaccatacggcggagatttaggttttgtcacagaggcatcagacaacattccatcagcatacattgaagaggcgaaaacactcaaagaggatgaatggtctcaggaaccaataaaggtcagcaacggatatgccattatccaactgaaagaaaaactaaaggcaagaacgttctcatttgatgaagtaaagggccagatcagacggcaaatcgcaatggatcagctaggtgataaagcgacagttaagacactttggaaagaagctgatgtatcttggttttatggggaaaaaagtactaagtgattgacaaaaaattttgaaattgatagattatatacataataccaatacaaatagtcggaaattgaggtgtcgagaatggtacgtgtagcaaactccattactgaattaattgggaatacgccaatcgttaaattaaatcgccttgcagatgaaaacagtgcggatgtatatctaaaacttgaatacatgaaccctggaagcagtgtaaaagaccgtatcggtttagccatgattgaagcggctgaaaaagaaggaaaattaaaagccggtgatacaatcattgaaccgacaagcggaaatactggaatcgggcttgcaatggttgctgctgctaaaggattaaaagccattttggttatgcctgatacaatgagcatggagcgccgcaaccttcttcgcgcatacggtgctgagcttgtgctgactcctggtgcggaaggcatgaaaggtgccattaagaaagctgaagagcttgctgaaaagcacggatactttgtgccgcagcagtttaacaacccttctaaccccgaaattcaccgccaaacaacgggtaaagaaatcgttgagcaattcggtgatgaccagcttgacgcatttgtagccggaatcggaacgggcggaacgattacgggagcgggcgaagtgctgaaggaagcatacccttccatcaagatttatgctgttgaaccgtcagattccccagtgctttcaggaggaaaaccaggcccccacaaaattcagggaatcggagcgggattcgtgccggacatcttaaacactgaagtatatgatgaaatcttccctgtgaagaatgaagaagcattcgaatatgcccgcagagctgcacgtgaagaaggaattctcggaggcatctcatcaggtgcggcaatttatgctgctcttcaagtagcaaaaaaactcggaaaaggcaaaaaagtattggccatcattccaagtaacggcgaacgttatctaagcacgccgctgtatcaattcgattaaaaaaagccaaaactcccggtccgccgggagtttttttatatttcgtgcatcaaatatgccatgtctgcgacgaatgttattcttggaagagaaattcacttttttcactaacaacattgctttacaattaaaaacaagtaaaaaagaaaatagaggaatgatacaaatggcacaacgcagaccggcaggcaaaaaaataccttttcaaaaagactcattcttacaacaatttgagaaacttgcgcaatcccggaaacatcatgtacttctcgaaagtgcaagaggcggcagatacagtatagccggtcttgatccaattgcgactgtgaaaggaaaagacggaataactacaattaagcatggtgatgagatgctgtttaaagaaggtgatccattacgggccttccacagctggtttaaaacgctggaaacagaaacaaatcatgagttccctgactttcaaggcggggcaatcgggtttctcagctatgattacgcacggtacattgaaaattttaaaatgctctcattagatgatctagaaacaccagatatttattttcttgtttttgatgatatagcagtttatgaccatcaagaagagtctctatggctgattactcatgttaatggttctgatcaggaaacagcgaatgtgaagctatctgagttagagcagatgtggctgactgagcttcccgctgtctcttcgcgagagatgaaccctgaaacagatggttctttcgcggcgccatttaccgaggatgggttctcgcaagctgtagagaaaatcaaacaatacattgccagcggagatgtgtttcaagtcaatctatcaataaggcagtcacagtcactgtctgcccacccatatcaaatttacaaaaccttgagagaagtaaatccttctccttatatggcgtatttagaaacacctgatttccaaatcatttgcggctcgcctgaactgcttgtcagcaaaaagggcaagctattagagacgagaccgattgcgggcacccgttccagagggaaaacaaatgaagaagacgaggtgcttgcaaacgaattgatacacaatgaaaaagaacgcgcggaacatgtcatgctggttgatcttgagcgaaatgatctgggaagagtatcacggtacgggtctgtgcgcgtaaatgaattcatggcaattgaaaaatactcgcatgtgatgcacattgtgtctaatgtccaaggtgaactgcaggatgggtatgatgctgtagatattattcatgctgtattccccggaggaaccattactggtgcaccgaaagtaagaacgatggaaattatagaagaacttgagccgacacgccgagggctttatactggatctataggatggtttggatataatcacgatctgcagtttaatatcgtcattcgaaccatttatgcaaccggagggcaggcatttatgcagtccggcgcaggagttgtgattgattctgttccgaagcacgaatacaaggaatcattcaaaaaagcttttgcgatgcaaagagcattagagctgagcaaagaagagacaaaaattagatgaggtgagcggagaaatgattttaatgattgataactacgattcattcacgtacaacttggtacagtatttgggcgagcttggggaagagctggttgtgaaacgcaatgacagcatcacaatcgaagaaattgaagaactgtctccggactttctgatgatatctcccggaccgtgcagccctgatgaggcgggaatcagcctcgaagcgattaaacatttcgcagggaaaattcctattttcggtgtatgtctcggacaccagtccatcgcacaagtgttcggtggtgacgttgttagggcagaacggcttatgcacgggaaaacctcggatatcgagcatgacggcaagaccatttttgaagggttgaaaaacccccttgttgcgacgcgataccactcgctgatcgtaaaacctgagacgctgccaagctgttttacagtaacagcacaaacgaaagaaggagaaatcatggctattcgccacaatgacctcccgatagagggcgtgcaatttcacccagagtctattatgacctcctttgggaaagaaatgctcagaaattttattgaaacatatcgcaaggaagttattgcgtgatgatatatgtgaacggccggtatatggaggagaaagatgcagttctttctccttttgaccatgggtttttatatgggatcggtgttttcgaaaccttcaggctctacgaaggctgtccgtttttgcttgattggcatatagaaaggcttgaacgcgcgcttaaggatctgcaaatcgaatatactgtttcaaagcatgagatccttgagatgctggacaagctgcttaagctaaatgatatcaaggatggcaatgcccgcgtcagactgaacatatcagcggggatcagcgataaaggctttgtcgcccagacgtatgataagccgaccgttttatgctttgtgaatcagctgaaaccagaaagccttcctttgcaaaaagaagggaaggttttatcgatacggagaaacactcctgagggatcgttccggttaaaatctcatcattatctaaataatatgtatgcgaaacgggaaattggaaatgatccacgtgtcgagggaattttcctaacggaggatggagctgttgcagagggtatcatatctaatgtcttctggagaaaaggtcgctgtatctatacgccatcgcttgatactggtattctggacggcgtcacgagacgttttatcatagaaaatgcaaagaatatcggcctggagctcaaaacgggccgatatgagccagaagctctcttgacagctgacgaagcgtggatgacgaactcggttcttgaaatcatcccgtttactaaaatagaagaagtaaactatggaagccaaagcggagaagcaacctccgctcttcaattgttatacaaaaaagaaataaagaacatgattcatgaaaagggaggaagagcatggcgcagcacacaatagatcaaacacaagtaatccacactaagcccagcgctttatcatataaagagaagacgctggtgatgggaattttaaacgtaacgcctgactctttctcggacggcggaaaatatgacagcttagacaaggcgctgctgcacgcggaagagatgatcaatgatggtgcccatatcattgatatcggaggggaatcgacaaggcctggcgctgagtgcgtatctgaggatgaggagatgtccagagtcattccggtgattgagcggattacgaaagagcttggtgttcctatttctgtagatacgtacaaggcttctgtcgcagatgaagcagtgaaagccggcgcatccattatcaatgatatttggggtgctaaacatgatccgaagatggcttccgttgcagctgaacataatgttccaattgttctcatgcataaccgccctgaaagaaactacaatgacttattgccggatatgctgtcggacttaatggagagtgtaaaaattgctgttgatgccggagtagacgagaagaacattattcttgatcccggtatcggtttcgcgaaaacctatcacgataacttggcagtgatgaacaaactagagattttcagcgggctggggtatccggttcttctggcaacctcccgaaaaagattcatcggacgtgttctggatcttccgcctgaggagcgggctgagggcacaggcgcgactgtgtgtctcggcattcaaaaaggctgtgacattgtcagggtccatgatgtaaagcaaattgccagaatggcgaaaatgatggacgcgatgctgaataagggaggggtgcaccatggataaagtttatgtagaaggtatggagttttacggatatcacggtgtgttcaaagaagaaaacaaacttggccagcggtttaaagtcgatttaaccgctgagctggatttaagcaaagctggacaaacagacgaccttgagcaaacgatcaactatgctgagctctatcacgtatgtaaagatatcgtggaaggggagcctgtaaaattggtagaaacgctggcggaacgtattgctggcactgttctcgaaaaatttcagcctgttcagcaatgtacggtgaaagtgattaagccagacccgccaattcccggacactataaatcagtagcaattgaaattacgagaaaaaagtcatgaacaacatagcttatattgcacttggatctaatattggagatagagaaacgtatttaaggcaagcagtggcttcactgcatcagcatgctgcggtgacagtcactaaagtgtcgtctatttacgaaactgacccggtcggatacgaagatcaagctcaatttttgaatatggctgttgaaatcaagacatcattgaacccttttgaactccttgaactgacgcagcagatagaaaatgaattaggcagaacaagggaagtaagatgggggccgcggacggcagaccttgacattttgttatttaatcgtgaaaatattgaaacagagcaactaattgttccgcatccgagaatgtatgagcgtttgtttgtccttgcgccgcttgcggaaatttgccagcaggttgaaaaagaggctacaagcgccgaaacagaccaagaaggtgtaagagtatggaagcagaaatctggggtagacgaattcgtgcattcagaaagctgaaaggttatactcaagaaggatttgcaaaagcattaggtatatcagtttctattctcggcgaaattgaacgcggaaaccgattgccgtcagctgccataattcaagatgcagcagatgttttaaatataagtgcggacgaattggcgccgccagaaaaatagaacaaatgaaaggaggagaaaaattgttcaaaatcggagatattcaattgaaaaaccgggttgtgctcgcacctatggctggtgtctgcaactctgcgttcagattgactgtaaaggaattcggagccggattggtatgcgctgaaatggtcagtgacaaagcgatcctttacaacaatgcaagaacaatgggtatgctttatatcgatgaacgtgagaaaccactcagccttcaaattttcggaggaaaaaaggaaacccttgtggaagcggcgaagtttgtagaccaaaacacaactgctgatatcattgacattaacatgggatgtcccgtgccgaagattacaaaatgcgatgcgggagccaaatggcttctcgatcctgataagatttacgaaatggtttctgcagtagtggatgctgttaataaaccagttacagtgaaaatgagaatgggctgggatgaagaccacattttcgcagtgaaaaatgcacaggctgtagaacgtgcgggtggtaaagcagttgcgcttcacggccgtacgagagtgcagatgtacgaaggaacggcaaactgggatatcatcaaagaagtaaaacaatcagtatcgattccggttatcggaaacggcgatgttaagacaccgcaggatgctaagcgtatgctcgatgagacaggagtagacggggtcatgatcggacgcgctgcattgggcaacccgtggatgatttaccgtacggttcagtatcttgaaacaggtgaattaaaagaagagccgcaagtacgcgaaaaaatggccgtatgcaaactgcatcttgaccgcctgattgacttaaaaggtgaaaacgtagcggtaagagaaatgagaaagcacgctgcatggtatctgaaaggcgtgaaaggcaatgcgaacgttcgtaatgaaatcaatcattgcgagacgagagaagagtttgtacagcttttagatgcatttacggttgaagttgaggcaaaagagcttcaaaatgcaaaagtaggataatactcacctctatttgctgctcactgctagttttacgctggcagtttttctgcttttttcatgaaacaatatctgtaatggagtgataacaatgagtcaagaagagcataaccatgaagaattgaatgatcagctgcaagtcagacgcgataaaatgaatcagctgagagataacggcatcgatccattcggcgcacgttttgaaagaactcatcagtctcaagaagttatttcggcatatcaagatctaaccaaagaagagttggaagaaaaagcgattgaagttacaatcgcaggccgcatgatgacaaaacgcggcaaaggaaaagccggctttgcccatcttcaggatttagaaggccaaatccaaatctacgtaagaaaagacagtgtcggtgacgaccaatatgaaatcttcaagtcttctgacctcggtgatcttatcggcgtaaccggaaaagtcttcaaaacaaatgtaggcgaattgtctgttaaagcaacttcctttgaattgctgacaaaagcgcttcgtccgcttcctgacaaataccatggtttaaaagacgttgagcagcgctaccgtcagcgctacctggatcttatcgtaaacccagacagcaaacatacgtttattacacgaagcaagatcattcaagctatgagaagataccttgatgatcatggatacttagaagtagaaacacctacaatgcacagcattcctgggggagcttctgcacgtccgtttatcactcaccacaacgcgttagacattccactctatatgcgtattgctatcgaactgcacctaaaacgtctaattgtcggcggtttagaaaaagtatatgaaatcggccgtgttttccgtaacgaaggtgtctctacacgccataaccctgaatttacaatgattgagttatatgaagcatatgcggactataaagatatcatgagcttaactgaaaaccttgtcgctcatatcgcccaagaagtgcttggcacaactacgattcaatacggggaagagcaaatcgaccttaaaccggagtggaaaagaatccatatggttgacgcagtcaaagaagcgaccggcgttgatttctgggaagaggttactgttgaacaggcgcgtgaatatgcaaaagaacatggagtagaaattaaagactctatgacagtaggccatatcatcaacgaattcttcgaacaaaaaattgaagaaacgcttattcagccaacgtttatttacgggcatcctgtagaaatttctcctcttgctaagaaaaaccctgaggacccgcgttttacagaccgttttgagctgtttatcgttggccgtgaacatgccaacgcgtttacagagctgaatgatcctattgatcaaagagaacgctttgaagcgcaattaaaagagcgtgaagccggtaatgatgaagctcatctaatggatgaagactttgttgaagctctggaatacggtatgccgccaacaggaggtttaggcatcggtatcgaccgtctggttatgctgctgacgaatgccccttctattcgcgatgtgctgttattcccgcaaatgagacaacgctaataaagaagagcggtatcctccatagagaaaggatgccgctctttttaaattccttagtatttcttcaaaaaaactattgcactattatttactaggtggtatattattattcgttgccgctaaacaaggcgataacgaaaaaataacttaaaaaaagttattgacttcactgagtcaacgagttataataataaagtcgcttgaacgaagtgaacaaaatgatctttgaaaactaaacaagacaaaacgtacctgttaattcagtttttaaaaatcgcacagcgatgtgcgtagtcagtcaaactactttatcggagagtttgatcctggctcaggacgaacgctggcggcgtgcctaatacatgcaagtcgagcggacagatgggagcttgctccctgatgttagcggcggacgggtgagtaacacgtgggtaacctgcctgtaagactgggataactccgggaaaccggggctaataccggatggttgtttgaaccgcatggttcaaacataaaaggtggcttcggctaccacttacagatggacccgcggcgcattagctagttggtgaggtaacggctcaccaaggcgacgatgcgtagccgacctgagagggtgatcggccacactgggactgagacacggcccagactcctacgggaggcagcagtagggaatcttccgcaatggacgaaagtctgacggagcaacgccgcgtgagtgatgaaggttttcggatcgtaaagctctgttgttagggaagaacaagtaccgttcgaatagggcggtaccttgacggtacctaaccagaaagccacggctaactacgtgccagcagccgcggtaatacgtaggtggcaagcgttgtccggaattattgggcgtaaagggctcgcaggcggtttcttaagtctgatgtgaaagcccccggctcaaccggggagggtcattggaaactggggaacttgagtgcagaagaggagagtggaattccacgtgtagcggtgaaatgcgtagagatgtggaggaacaccagtggcgaaggcgactctctggtctgtaactgacgctgaggagcgaaagcgtggggagcgaacaggattagataccctggtagtccacgccgtaaacgatgagtgctaagtgttagggggtttccgccccttagtgctgcagctaacgcattaagcactccgcctggggagtacggtcgcaagactgaaactcaaaggaattgacgggggcccgcacaagcggtggagcatgtggtttaattcgaagcaacgcgaagaaccttaccaggtcttgacatcctctgacaatcctagagataggacgtccccttcgggggcagagtgacaggtggtgcatggttgtcgtcagctcgtgtcgtgagatgttgggttaagtcccgcaacgagcgcaacccttgatcttagttgccagcattcagttgggcactctaaggtgactgccggtgacaaaccggaggaaggtggggatgacgtcaaatcatcatgccccttatgacctgggctacacacgtgctacaatggacagaacaaagggcagcgaaaccgcgaggttaagccaatcccacaaatctgttctcagttcggatcgcagtctgcaactcgactgcgtgaagctggaatcgctagtaatcgcggatcagcatgccgcggtgaatacgttcccgggccttgtacacaccgcccgtcacaccacgagagtttgtaacacccgaagtcggtgaggtaaccttttaggagccagccgccgaaggtgggacagatgattggggtgaagtcgtaacaaggtagccgtatcggaaggtgcggctggatcacctcctttctaaggatattatacggaatataagaccttgggtcttataaacagaacgttccctgtcttgtttagttttgaaggatcattccttcgaaacgtgttctttgaaaactagataacagtagacatcacattcaattagtaatacaagatatcacatagtgattctttttaacggttaagttagaaagggcgcacggtggatgccttggcactaggagccgatgaaggacgggacgaacaccgatatgcttcggggagctgtaagcaagctttgatccggagatttccgaatggggaaacccaccactcgtaatggagtggtatccatatctgaattcataggatatgagaaggcagacccggggaactgaaacatctaagtacccggaggaagagaaagcaaatgcgattccctgagtagcggcgagcgaaacgggattagcccaaaccaagaggcttgcctcttggggttgtaggacactctgtacggagttacaaaagaacgaggtagatgaagaggtctggaaaggcccgccataggaggtaacagccctgtagtcaaaacttcgttctctcctgagtggatcctgagtacggcggaacacgtgaaattccgtcggaatccgggaggaccatctcccaaggctaaatactccctagtgaccgatagtgaaccagtaccgtgagggaaaggtgaaaagcaccccggaaggggagtgaaagagatcctgaaaccgtgtgcctacaagtagtcagagcccgttaacgggtgatggcgtgccttttgtagaatgaaccggcgagttacgatcccgtgcaaggttaagcagaagatgcggagccgcagcgaaagcgagtctgaatagggcgcatgagtacgtggtcgtagacccgaaaccaggtgatctacccatgtccagggtgaagttcaggtaacactgaatggaggcccgaacccacgcacgttgaaaagtgcggggatgaggtgtgggtaggggtgaaatgccaatcgaacctggagatagctggttctctccgaaatagctttagggctagcctcaaggtaagagtcttggaggtagagcactgattggactaggggcccctaccgggttaccgaattcagtcaaactccgaatgccaatgacttatccttgggagtcagactgcgagtgataagatccgtagtcgaaagggaaacagcccagaccgccagctaaggtcccaaagtatacgttaagtggaaaaggatgtggagttgcttagacaaccaggatgttggcttagaagcagccaccatttaaagagtgcgtaatagctcactggtcgagtgactctgcgccgaaaatgtaccggggctaaacgtatcaccgaagctgcggactgttcttcgaacagtggtaggagagcgttctaagggctgtgaagccagaccggaaggactggtggagcgcttagaagtgagaatgccggtatgagtagcgaaagaggggtgagaatcccctccaccgaatgcctaaggtttcctgaggaaggctcgtccgctcagggttagtcgggacctaagccgaggccgaaaggcgtaggcgatggacaacaggttgatattcctgtaccacctcctcaccatttgagcaatggggggacgcaggaggatagggtaagcgcggtattggatatccgcgtccaagcagttaggctgggaaataggcaaatccgtttcccataaggctgagctgtgatggcgagcgaaatatagtagcgaagttcctgattccacactgccaagaaaagcctctagcgaggtgagaggtgcccgtaccgcaaaccgacacaggtaggcgaggagagaatcctaaggtgatcgagagaactctcgttaaggaactcggcaaaatgaccccgtaacttcgggagaaggggtgctctgttagggtgcaagcccgagagagccgcagtgaataggcccaggcgactgtttagcaaaaacacaggtctctgcgaagccgtaaggcgaagtataggggctgacgcctgcccggtgctggaaggttaagaggagcgcttagcgtaagcgaaggtgcgaattgaagccccagtaaacggcggccgtaactataacggtcctaaggtagcgaaattccttgtcgggtaagttccgacccgcacgaaaggcgcaacgatctgggcactgtctcaacgagagactcggtgaaattatagtacctgtgaagatgcaggttacccgcgacaggacggaaagaccccgtggagctttactgcagcctgatattgaatgttggtacagcttgtacaggataggtaggagccttggaaaccggagcgccagcttcggtggaggcatcggtgggatactaccctggctgtattgaccttctaacccgccgcccttatcgggcggggagacagtgtcaggtgggcagtttgactggggcggtcgcctcctaaaaggtaacggaggcgcccaaaggttccctcagaatggttggaaatcattcgcagagtgtaaaggcacaagggagcttgactgcgagacctacaagtcgagcagggacgaaagtcgggcttagtgatccggtggttccgcatggaagggccatcgctcaacggataaaagctaccccggggataacaggcttatctcccccaagagtccacatcgacggggaggtttggcacctcgatgtcggctcatcgcatcctggggctgtagtcggtcccaagggttgggctgttcgcccattaaagcggtacgcgagctgggttcagaacgtcgtgagacagttcggtccctatccgtcgcgggcgcaggaaatttgagaggagctgtccttagtacgagaggaccgggatggacgcaccgctggtgtaccagttgttctgccaagggcatcgctgggtagctatgtgcggacgggataagtgctgaaagcatctaagcatgaagcccccctcaagatgagatttcccattccgcaaggaagtaagatccctgaaagatgatcaggttgataggtctgaggtggaagtgtggcgacacatggagctgacagatactaatcgatcgaggacttaaccatatttttgaatgatgtcacatctgttatctagttttgagagaacactctcaatttgtttggtggcgatagcgaagaggtcacacccgttcccataccgaacacggaagttaagctcttcagcgccgatggtagtcggggggttccccctgtgagagtaggacgccgccaagcaattgcacgttagtgcaattatggaggattagctcagctgggagagcatctgccttacaagcagagggtcggcggttcgagcccgtcatcctccaccattatgccggtgtagctcaattggtagagcaactgacttgtaatcagtaggttgggggttcaagtcctcttgccggcaccacttttatatgatataatactcaagtctcttgtagaagagccattagctcagttggtagagcatctgacttttaatcagagggtcgaaggttcgagtccttcatggctcaccattttacgcgggtgtggcggaattggcagacgcgctagacttaggatctagtgtctttatgacgtgggggttcaagtcccttcacccgcattatataggataacagttagaaaaactggacatcctgtctgcggaagtagttcagtggtagaacaccaccttgccaaggtgggggtcgcgggttcgaatcccgtcttccgctccaactataccatccacgccggggtggtggaattggcagacacacaggacttaaaatcctgcggtaggtgactaccgtgccggttcaagtccggccctcggcattatgttttgcgcccgtagctcaattggatagagcgtttgactacggatcaaaaggttaggggttcgactcctctcgggcgcgccatattttttaatagaatagatgggaaatcgggaagtagctcagcttggtagagcacatggtttgggaccatggggtcgcaggttcgaatcctgtcttcccgaccattttttatggggccttagctcagctgggagagcgcctgctttgcacgcaggaggtcagcggttcgatcccgctaggctccaccaaaagttttttaaaaaagttgttgactttgaagaagtgacgttgtataatgataaagttgctttaacaaagcagacaaacaaaatgatctttgaaaactaaacaagacaaaacgtacctgttaattcagtttttaaaaatcgcacagtgatgtgcgtagtcagtcaaactactttatcggagagtttgatcctggctcaggacgaacgctggcggcgtgcctaatacatgcaagtcgagcggacagatgggagcttgctccctgatgttagcggcggacgggtgagtaacacgtgggtaacctgcctgtaagactgggataactccgggaaaccggggctaataccggatggttgtttgaaccgcatggttcaaacataaaaggtggcttcggctaccacttacagatggacccgcggcgcattagctagttggtgaggtaacggctcaccaaggcaacgatgcgtagccgacctgagagggtgatcggccacactgggactgagacacggcccagactcctacgggaggcagcagtagggaatcttccgcaatggacgaaagtctgacggagcaacgccgcgtgagtgatgaaggttttcggatcgtaaagctctgttgttagggaagaacaagtaccgttcgaatagggcggtaccttgacggtacctaaccagaaagccacggctaactacgtgccagcagccgcggtaatacgtaggtggcaagcgttgtccggaattattgggcgtaaagggctcgcaggcggtttcttaagtctgatgtgaaagcccccggctcaaccggggagggtcattggaaactggggaacttgagtgcagaagaggagagtggaattccacgtgtagcggtgaaatgcgtagagatgtggaggaacaccagtggcgaaggcgactctctggtctgtaactgacgctgaggagcgaaagcgtggggagcgaacaggattagataccctggtagtccacgccgtaaacgatgagtgctaagtgttagggggtttccgccccttagtgctgcagctaacgcattaagcactccgcctggggagtacggtcgcaagactgaaactcaaaggaattgacgggggcccgcacaagcggtggagcatgtggtttaattcgaagcaacgcgaagaaccttaccaggtcttgacatcctctgacaatcctagagataggacgtccccttcgggggcagagtgacaggtggtgcatggttgtcgtcagctcgtgtcgtgagatgttgggttaagtcccgcaacgagcgcaacccttgatcttagttgccagcattcagttgggcactctaaggtgactgccggtgacaaaccggaggaaggtggggatgacgtcaaatcatcatgccccttatgacctgggctacacacgtgctacaatggacagaacaaagggcagcgaaaccgcgaggttaagccaatcccacaaatctgttctcagttcggatcgcagtctgcaactcgactgcgtgaagctggaatcgctagtaatcgcggatcagcatgccgcggtgaatacgttcccgggccttgtacacaccgcccgtcacaccacgagagtttgtaacacccgaagtcggtgaggtaaccttttaggagccagccgccgaaggtgggacagatgattggggtgaagtcgtaacaaggtagccgtatcggaaggtgcggctggatcacctcctttctaaggatattatacggaatataagaccttgggtcttataaacagaacgttccctgtcttgtttagttttgaaggatcattccttcgaaacgtgttctttgaaaactagataacagtagacatcacattcaattagtaatacaagatatcacatagtgattctttttaacggttaagttagaaagggcgcacggtggatgccttggcactaggagccgatgaaggacgggacgaacaccgatatgcttcggggagctgtaagcaagctttgatccggagatttccgaatggggaaacccaccactcgtaatggagtggtatccatatctgaattcataggatatgagaaggcagacccggggaactgaaacatctaagtacccggaggaagagaaagcaaatgcgattccctgagtagcggcgagcgaaacgggattagcccaaaccaagaggcttgcctcttggggttgtaggacactctgtacggagttacaaaagaacgaggtagatgaagaggtctggaaaggcccgccataggaggtaacagccctgtagtcaaaacttcgttctctcctgagtggatcctgagtacggcggaacacgtgaaattccgtcggaatccgggaggaccatctcccaaggctaaatactccctagtgaccgatagtgaaccagtaccgtgagggaaaggtgaaaagcaccccggaaggggagtgaaagagatcctgaaaccgtgtgcctacaagtagtcagagcccgttaacgggtgatggcgtgccttttgtagaatgaaccggcgagttacgatcccgtgcaaggttaagcagaagatgcggagccgcagcgaaagcgagtctgaatagggcgcatgagtacgtggtcgtagacccgaaaccaggtgatctacccatgtccagggtgaagttcaggtaacactgaatggaggcccgaacccacgcacgttgaaaagtgcggggatgaggtgtgggtaggggtgaaatgccaatcgaacctggagatagctggttctctccgaaatagctttagggctagcctcaaggtaagagtcttggaggtagagcactgattggactaggggcccctaccgggttaccgaattcagtcaaactccgaatgccaatgacttatccttgggagtcagactgcgagtgataagatccgtagtcgaaagggaaacagcccagaccgccagctaaggtcccaaagtatacgttaagtggaaaaggatgtggagttgcttagacaaccaggatgttggcttagaagcagccaccatttaaagagtgcgtaatagctcactggtcgagtgactctgcgccgaaaatgtaccggggctaaacgtatcaccgaagctgcggactgttcttcgaacagtggtaggagagcgttctaagggctgtgaagccagaccggaaggactggtggagcgcttagaagtgagaatgccggtatgagtagcgaaagaggggtgagaatcccctccaccgaatgcctaaggtttcctgaggaaggctcgtccgctcagggttagtcgggacctaagccgaggccgaaaggcgtaggcgatggacaacaggttgatattcctgtaccacctcctcaccatttgagcaatggggggacgcaggaggatagggtaagcgcggtattggatatccgcgtccaagcagttaggctgggaaataggcaaatccgtttcccataaggctgagctgtgatggcgagcgaaatatagtagcgaagttcctgattccacactgccaagaaaagcctctagcgaggtgagaggtgcccgtaccgcaaaccgacacaggtaggcgaggagagaatcctaaggtgatcgagagaactctcgttaaggaactcggcaaaatgaccccgtaacttcgggagaaggggtgctctgttagggtgcaagcccgagagagccgcagtgaataggcccaggcgactgtttagcaaaaacacaggtctctgcgaagccgtaaggcgaagtataggggctgacgcctgcccggtgctggaaggttaagaggagcgcttagcgtaagcgaaggtgcgaattgaagccccagtaaacggcggccgtaactataacggtcctaaggtagcgaaattccttgtcgggtaagttccgacccgcacgaaaggcgcaacgatctgggcactgtctcaacgagagactcggtgaaattatagtacctgtgaagatgcaggttacccgcgacaggacggaaagaccccgtggagctttactgcagcctgatattgaatgttggtacagcttgtacaggataggtaggagccttggaaaccggagcgccagcttcggtggaggcatcggtgggatactaccctggctgtattgaccttctaacccgccgcccttatcgggcggggagacagtgtcaggtgggcagtttgactggggcggtcgcctcctaaaaggtaacggaggcgcccaaaggttccctcagaatggttggaaatcattcgcagagtgtaaaggcacaagggagcttgactgcgagacctacaagtcgagcagggacgaaagtcgggcttagtgatccggtggttccgcatggaagggccatcgctcaacggataaaagctaccccggggataacaggcttatctcccccaagagtccacatcgacggggaggtttggcacctcgatgtcggctcatcgcatcctggggctgtagtcggtcccaagggttgggctgttcgcccattaaagcggtacgcgagctgggttcagaacgtcgtgagacagttcggtccctatccgtcgcgggcgcaggaaatttgagaggagctgtccttagtacgagaggaccgggatggacgcaccgctggtgtaccagttgttctgccaagggcatcgctgggtagctatgtgcggacgggataagtgctgaaagcatctaagcatgaagcccccctcaagatgagatttcccattccgcaaggaagtaagatccctgaaagatgatcaggttgataggtctgaggtggaagtgtggcgacacatggagctgacagatactaatcgatcgaggacttaaccatatttttgaatgatgtcacatctgttatctagttttgagagaacactctcaatttgtttggtggcgatagcgaagaggtcacacccgttcccataccgaacacggaagttaagctcttcagcgccgatggtagtcgggggtttccccctgtgagagtaggacgccgccaagcaagcttaaacccagctcaatgagctgggttttttgtattttggtttattggtatcataaaattccacttaactgtataatataataactttataccgaattttaaatcagcaatcaggttttgtggaccgggaaaatggaaataatgaaggatagagcgagaaagttgaaaattctcgagaaacggcttatagtaagattaaagtcaaatatagtcaaagtcagtaaaggagggggttgagtgggacataatatttctgacatcattgaacaatatttaaaacgagtgttagatcaaaatggcaaggaaattttagagattaaacgaagtgaaattgcagataaatttcaatgcgttccttcccaaataaattatgtcatcaacaccagatttacaagcgaaagaggatatattgttgagagcaaacgcgggggtggcggttatatcagaatcattaaaattaaaatgaacaatgaagttgtcctgatcaataatattatttctcaaattaatacccatttgtctcaagcagcctctgatgacattattttaaggctattagaagacaaggtaatttcagaaagagaagcaaaaatgatggtcagcgtaatggaccgctcagttttacacattgacttgcctgaacgtgatgaattaagagcgagaatgatgaaggcaatgctgacttctttaaaattaaaataagcgggtgaaaagattgatttgtcaagagtgccacgagagaccagccacttttcactttacaaaggttgttaacggagaaaaaatagaagttcatatttgtgaacaatgtgccaaagaaaatagtgattcatatggtataagtgcaaatcagggtttctctattcataatttactttcgggtttactgaacatggattcttcatttcaaaatgcaggaactcaaatgttcagtcactcggagcaaatatctgcttgtccgaaatgcggaatgacttttcagcaattcagaaaaattggccgttttggatgttctgaatgttacaaaacatttcatagcaacattacacctatcctacgtaaagtgcacagcggaaacactttgcatgcagggaagataccgaaacgaataggcggcaatcttcatgtcagacggcagattgatatgctaaaaaaggaattagaatccttaatccatcaagaagaatttgaaaatgcagctcatgtaagagatcaaattcgttcattagaacaatcactcaaaagtacagatagtgaggaggaacaggagtaatgtcgctaaagcattttattcaggacgcactaagcagttggatgaagcagaaaggacctgaaagtgacattgtactcagcagccgcatacgtttagcaaggaactttgagcatattcggttccctacgcggtattccaatgaagaagcctcatccatcatacagcaatttgaagatcagttttcagagcaagaaattcccggaatcggcaaatttgttttgattagaatgaatgatgcacagcctttagaaaagcgtgtacttgttgaaaaacatctaatcagtcctaatctgacagagtctccttttggcggctgtttgctttctgaaaatgaggaagtaagtgtcatgttaaatgaagaggaccatattagaattcagtgtcttttccctggatttcagcttttagaagcaatgaaagccgcaaaccaggtcgacgactggattgaagaaaaagttgattatgcattcaatgagcaaagaggatacttaaccagctgtcctacaaacgtaggtacaggtttaagggcttcggtcatgatgcatctgccggcactggttttaactaggcaaataaatcgaattataccggcaattaatcaattaggcttagttgttagaggaatttatggggaaggcagcgaagcagtagggaatatctttcaaatttcaaatcagatcacgcttggtaagtcagagcaggatattgtagaggatcttaacagtgttgctgctcagttgattgaacaagaacgatctgcccgagaagcgatttatcaaacttctaaaatcgaacttgaggatcgggtatatcggtcttatggggtcttgtctaattgccggatgatagaatcgaaagaaactgcaaagtgcctttcagatgttcggttaggcatagacctaggcattataaaaggactttcaagcaacatacttaacgaacttatgattttgacgcagccaggatttttacagcaatactcgggaggcgctttgcgtccgaacgaaagggacattcgaagagcggctctcatcagagaacggcttcacttagaaatgaatgggaaacgacaggaggatgaatcgatatgatgtttggaagatttacagaacgagctcaaaaagtactggcgctagcacaggaagaagcacttcggttaggtcataataacattggcactgagcatattttattaggactggtaagagaaggagagggcattgctgctaaagctcttcaagcgcttggactcggttcagataaaattcagaaagaagtagaaagtttgatcgggcgcgggcaggaaatgtctcaaacgattcattatactcctagagctaaaaaagtcattgagctttcaatggatgaggcaagaaaactcggtcattcttatgttggaacagaacatattcttcttggactgattcgtgaaggagaaggtgttgctgcgagagttttgaataatctcggtgtcagcttaaataaagcaagacagcaggtgctccagcttctaggaagtaatgaaacaggatcatcagcggcaggaacaaacagcaatgcgaatacgcctacgcttgacagcttggcaagagacttaactgctattgcgaaggaagacagccttgaccctgtaatcggcagaagcaaggagatccagcgtgtcattgaagtattaagccgcagaacgaaaaacaaccctgttctcattggggaaccaggtgtaggtaaaacggctatcgcagaaggtttggcacagcaaattatcaataatgaagtacccgaaattttgcgtgataaacgtgtgatgacattagacatgggaacagttgttgccggcacaaaatatcgcggagaatttgaggatcgcctgaagaaggtcatggatgaaattcgccaggcaggaaatatcattctattcatcgatgagctccatacattaatcggggcaggcggagcagaaggtgctattgatgcatctaatattttaaaaccttcacttgctcgcggcgaactccaatgtattggtgcaacgactcttgatgagtaccgtaaatatattgaaaaagatgcagcactggaacgccgttttcagccgattcaggttgatcagccatctgtagatgaaagtattcaaattttacaaggtctgcgtgacagatacgaagcccaccaccgcgtttctatcactgatgatgccattgaagctgcggttaagctttctgacagatatatttctgaccgcttccttccggataaagcaattgacttgatcgatgaagcaggttcaaaggtgagactgcgctcatttacaacgcctcctaacttaaaagagcttgagcagaagcttgatgaggttcgtaaagagaaggatgcggcagtgcaaagccaagagtttgaaaaagctgcttccttgcgtgatactgaacaacgcctgcgcgagcaagtagaggatacgaagaaatcatggaaagagaagcaagggcaggaaaactcagaggttactgtggatgatattgcgatggttgtatccagctggaccggtgtgcctgtatctaaaatcgcccaaactgaaactgataagcttctcaatatggaaaacattcttcattcccgcgtcatcggccaggatgaggcagttgtagctgttgcaaaagccgtcagacgtgcgagagcagggttgaaagatcctaaacgcccaatcggctcattcattttcttaggccctacaggtgtaggtaaaacagaacttgcacgagcacttgctgaatccatttttggcgatgaagaatccatgatcagaattgacatgtctgaatacatggaaaaacactcaacttcaagacttgttggttcacctccgggatatgtgggatatgatgaaggcggtcaattgacagagaaagtcagaagaaaaccttactctgtcgtgcttcttgatgagatcgagaaagcgcaccctgatgtcttcaatatccttctgcaagttcttgaagacgggcgattgactgattctaaaggacgcacagtcgatttccgcaataccattctgatcatgacatcaaacgtcggagcaagtgagctgaaacgcaataaatatgtcggctttaacgttcaggatgaaactcaaaatcataaagacatgaaagataaagtgatgggtgaattgaaacgagcgttcagacctgagttcatcaaccgtattgatgaaatcattgtcttccattcacttgagaaaaaacatcttactgaaattgtgtcattaatgtctgatcaattaacgaaacgcctgaaagaacaagatctttctatcgaattgacagatgctgcaaaagcgaaagtcgcggaagagggcgttgacctggaatacggtgcccgtccgttaagaagagcgatccaaaaacatgtcgaggatcgtttatctgaagaactcctcagaggaaatattcataaaggacagcatattgttcttgatgtagaagatggcgaatttgtcgtaaaaacgactgctaaaacgaattaatatagaagacggaaatgaggcatacagcatgtaagtgtatgcctcactttcatatcaagaaatagaacaagggagaggtcttacactatatatggctaaaacaaaatcgaaattcatctgccaatcctgcggctacgagtctccaaaatggatggggaaatgtccgggctgcggtgcttggaatacaatggtggaagaaatgattaaaaaagcaccggccaatcggagagcggctttttctcattctgttcaaactgtacagaaaccttcacctattacatcaatcgaaacatcagaagaaccccgcgtcaaaacccagcttggcgagtttaacagagtactcggcggaggtgtcgttaaaggctccctcgttttaattggcggtgatcctggtatcggaaagtcaacgctattactgcaggtttccgctcaattatcaggctcatcaaacagtgtcctgtatatttcgggagaagaatctgtaaagcaaacgaagctgcgagcagaccgtctcggcattaataatccgtcactgcatgttttatctgaaaccgatatggagtatatttcgtctgctatacaagagatgaatccagcgtttgtcgttgttgactctattcaaacggtttaccaaagcgatattacatcggctccaggcagtgtgtcacaggtcagagaatgtaccgctgagctgatgaaaattgcaaaaacaaaaggtattccgatttttatcgtagggcacgtaacgaaagaagggtctattgcaggtccaagactgttggagcatatggttgacactgttttatattttgaaggagaacgccaccatactttccgtattttgcgggctgtaaaaaaccgtttcggatctacaaacgaaatgggcattttcgaaatgcgggaagaggggctcactgaggttttgaatccttcggaaattttcttagaagaacgctctgctggttccgcaggctcgagtatcactgcctctatggagggcactagaccgattctcgttgaaattcaggcgctcatctcgccaacaagctttggcaacccaaggcgtatggcaacgggaatagaccataacagggtctctctgttaatggctgtgttagaaaaaagagttggactgctgctgcaaaatcaggatgcttatttgaaagtggctggcggcgttaagcttgatgaaccggcaattgatcttgccattgcgattagtatcgcatcaagctttagagacacacctccaaatcctgcagattgttttattggagaagtgggattaaccggagaagtccggcgggtttcaagaattgaacagcgtgtgaaagaagcggcaaagcttggttttaaacgcatgatcatacccgcggcaaatctggatggatggacaaaaccaaaagggattgaggttatcggagtagcaaatattgcagaagcgcttcgtacttcattaggaggataatagatggaaaaagagaaaaaaggggcgaaacacgagttagacctgtcatctatattgcagtttgttgctccgggtacaccgctcagagcggggatggaaaacgtcttgagagcaaatacaggcggtctgattgttgttggatataatgataaagtaaaagaagtggtggacggcggctttcacataaacacggctttttctccggcgcatttatatgagctggctaaaatggatggagcgatcattttaagtgattctggtcaaaagatcctctacgcgaatactcagctgatgccggatgccacaatttcttcatcagaaacaggaatgcggcacagaactgccgaaagagtagctaagcaaactggctgtcttgtaatcgctatttctgaaagaagaaatgtcataacgttatatcaggaaaacatgaagtatacactaaaagacataggatttattttaaccaaggcgaaccaagccattcaaacacttgaaaaatataagacaatcctcgataaaacgattaatgcactgaacgcgttagagtttgaggaacttgttaccttcagtgatgtcttgtctgtcatgcatcgttatgaaatggtactgagaatcaaaaacgaaattaatatgtatatcaaagagctggggacagaagggcatctgatcaaactgcaagtcattgaattgattacggatatggaagaagaggccgctttatttattaaggactatgtaaaagaaaagattaaagatccgtttgttctcttgaaggagctgcaggatatgtccagttatgatctgctggatgattccattgtgtataagcttctcggttaccctgcttctactaatcttgatgattatgtattgccgagaggatacaggctgttaaataagataccgcgtcttccgatgccgattgttgaaaatgttgtagaagcatttggagtcctgccaaggattattgaggcgagtgcagaagaattagatgaagtagagggaatcggtgaagtacgagcccaaaaaatcaaaaaaggattaaaacgcctgcaagagaagcattatttagacagacaactgtgatttcggttaaaaccttatgaatacgggtatattaatgttggtttttgtttattctgatattcgtaggatgcataagactttgtgaaattaaaatgttaaaaaaggaggtgggggtatgttaaaacgaatagttcaggcgttcttcattatttttggcggcgttgttggtatatttttgatacctgaattgtttgtactgttaaatatacaggacatacctttaataacaaacgcatatacgtctgcggcaataggagcaattatcttttttctcatcagtatatggggtacagaatacgttgtgaactgggtgaagtggatagaggattcattgttaaaagcgccggttccagatttgttatttggaagtcttggcttagtttttggacttataattgcttatcttatcgtaaatgttattcctttagacaatataccttaccgcatattcagcacaataattcctgtatttttggctttcttcctcggttatctcggcttccaggtgggctttaagaaaaaggatgaattgatcagcctgttttccatttccgccagaatgcaaaagaaaaaaggaacagctgatgaagaacatgaggttcaagacaagaagctgaaaattttggacactagtgttattattgatgggagaatagcagatatttgtcagactggttttttagagggagttatcgtgattccgcagtttgtccttgaggaattgcagcatattgcagactcttcagatgttttaaaacgaaacagaggacgccgcggtcttgatatcctgaaccgcattcagaaagaattagacattgaagttgaaatttacgaaggcgactttgaagatattcaggaggttgacagcaagctcgtcaaacttgctaagctgacatccggggtcgttgtgacgaatgattttaatttaaataaagtgtgcgagcttcagaaggtagcagtattaaacattaatgaccttgccaatgcggtcaagcctgttgtgcttcctggcgaggaaatgaatgttcaggtcattaaggacgggaaagagcataatcagggagttgcctacttggatgacggtacgatgattgtcgttgaagaaggacgaaattatatcggcaagcatattgatgtactcgtcacaagtgtgctgcagacagcagcgggacgaatgatttttgcgaagcctaagctgttggagaaggcgctgtaaagggagaagaaacaatgagttatgatgtggtgattcctgcagccggacagggaaagcggatgaaggcagggagaaataaactgttcattgatctgaagggagacccggtgatcatacacacgttaagagtgtttgacagccaccggcagtgcgataaaatcattttggtgattaacgagcaggagcgggagcactttcaacacttgctgtccgattacccgttccaaacttcaattgagcttgttgcaggcggagaagagcgtcagcacagtgtgtataaggggctgaaagccgtaaagcaggaaaagattgtccttgtacatgacggtgcccgcccatttataaaacatgaacaaattgacgaactgatcgcagaggcggaacagacaggagcggccatccttgctgttccggtaaaagatacgattaaacgcgttcaagatttacaagtcagtgagacgattgaacgttcaagcttgtgggctgtccaaacgccacaagcttttcgtctttctttattgatgaaggctcacgctgaggccgagcgcaagggatttttagggacggatgacgccagcctcgttgaacagatggagggcggttcggtccgtgttgtagaaggcagctatacaaatattaagctgacgacgccagacgatttgacgtcagctgaagctatcatggaatcagaaagtgggaataaacatgtttagaattggacaaggatttgatgtgcatcaattagtggagggccgtcctctcattattggcggaattgaaatcccgtacgaaaaagggctgcttggccattctgatgcagacgtattgctgcatactgtcgctgacgcctgcctgggagctgtgggtgaaggagacatcggcaagcattttcctgacacagatcccgagttcaaggacgcagattctttcaaattacttcagcatgtctggggaatcgtgaaacagaaggggtatgtccttgggaacattgattgcaccatcatagcgcaaaagccgaagatgctgccgtacatagaagatatgagaaaaagaattgctgaaggccttgaggcagaagtttctcaagtaaatgtaaaagcaacaacgacagaaaagcttggatttacaggccgggcggaaggaatagcggctcaggcgacagtactgatacaaaaaggctaacttgttttgatgccgggtctatttggtggtagaatagattcatacatttttgcctgaggccatacatgacatgaaaggaagtatttgaaaatgggaaacgaagtacgcgtccgttatgcaccgagtccaaccggacatttgcatattggaaatgccagaacggcgctttttaattatttatttgcccgcaatcaaggcggtaagtttatcattcgagttgaggatacagataaaaagcgcaatattgagggcggagaacaaagccagctgaattatctgaagtggctaggtattgactgggatgagagtgtggatgtcggaggagagtacggcccataccgtcagtcagagcgtaacgatatctataaagtgtactatgaagagcttcttgaaaaagggcttgcttataaatgttactgtacggaagaagagcttgaaaaagagcgtgaagaacagattgcccgcggagaaatgcctcgttattccggaaaacacagagacctgactcaggaagaacaggagaaatttatcgctgaaggcagaaaaccaagtattcgtttccgcgtgccggaaggaaaaatcatcgccttcaatgatatcgtaaaaggcgaaatttcttttgaatcagatggcatcggcgactttgttattgtgaaaaaggacggtacgccgacttacaacttcgcggtagcgattgatgactacttaatgaaaatgacacacgtgctgcgcggtgaggatcatatttctaacacaccgaaacagattatgatttatcaagcattcggatgggatattcctcagttcggacacatgacgctgatcgtaaacgaaagccgtaaaaagctcagtaaacgtgatgaatccattattcaattcatcgagcagtacaaagagcttggctacctgccagaagcactgttcaactttatcggcctgttaggctggtcaccggttggagaagaagagcttttcacaaaagagcagtttattgaaatttttgatgtaaatcgtttatctaaatcaccagctttgtttgatatgcataagctaaaatgggttaacaaccaatatgtgaagaagctggatcttgatcaggttgttgaattgacgcttccgcatttgcaaaaagccggcaaagttggcactgagctttctgctgaagaacaagaatgggttcgtaaactgatttccctgtatcatgagcaattaagctacggtgcggaaattgttgagctgactgatttgttctttacggatgagatcgagtataatcaagaagcgaaagctgttctggaagaagaacaggttcctgaagtgctcagtacattcgcagcgaagcttgaagagcttgaggagttcactccggataacatcaaagcatcgatcaaagcagtgcagaaagaaactggccataaagggaaaaaactgtttatgccgattcgtgttgctgtaacagggcaaactcatggtccggaactgccgcaatcaattgaattgatcggtaaagagactgcaattcagcgtttaaagaatatctaaataaatgattgttgacagggaagagtataaagctttaggccattacagaaaggatctccattggctgagagagatccatgagccgggttttagaagtgcgcccttaagacctttgaagaacgttttttgaaatcagtattcaaaggcggccgccgccgttacaggctgaagttgggagagcagaagtctgcttttcaaacagagtggaaccgcgcggttaaagcgtctctgtcatgtttacatgcagaggcgctttttttattgggtagaggaaatcagatagagaaacggggggaagcatgtgttttttagaatgctcaaagaagacattgatactgtgttcgatcaagatcccgcagcaagaagctattttgaagtgattttaacttattccggtttacatgctatatgggcgcatcggattgcacatgctttatataaacgaaaattttatttccttgcacgccttatatctcaagtaagccgattttttaccgggatagaaatccaccccggcgccacaatcgggagaagatttttcatagaccacggcatgggggttgtcattggggagacatgtgaaatcgggaataacgttaccgtttttcagggggttaccctcgggggaacggggaaagaaaagggaaaaaggcacccaacgattaaagatgacgcattgatagccacaggtgctaaagtgctcggttctattacggtcggtgaaggctcaaagattggggctggttcagtagtgctgcatgatgttcctgatttttcaacagttgtcggtatccctggacgggtcgttgtacaaaatggcaagaaagtaagacgcgatttaaaccatcaggatttgcccgatccggttgctgaccgctttaagtctttggaacagcagattttagagctgaaggcagaacttgaagacagaaaagaaaggatcaaccaaaaatgacaatcacactttataatacattgactagacagaaggaaacattcgttcctcttgaagagggaaaagtgaaaatgtatgtatgcggacccacggtttacaattacattcatatcgggaacgcgcgtccggcaatcgtttacgatacggttcgaaactatttagagtataaaggctatgatgtgcagtatgtctctaacttcacagacgtagacgataaactaattaaagcggcaaatgaactcggtgaggatgtacccaccatttcagagcgttttattaaagcatactttgaagacgtaggtgcgctcggctgccgaaaagccgaccttcatccgcgagtaatggagaacatggatgccattatcgaattcgtagatcagctcgtgaaaaagggctacgcatatgaatcagaaggtgacgtatatttcaaaaccagagcgtttgaagggtacggaaagctttctcagcaatcaatcgatgaacttagatcaggtgcacgcatccgagtcggcgagaaaaaagaagatgctcttgatttcgcactgtggaaagcggcaaaagaaggagaaatctcttgggatagcccttgggggaaaggacgtccgggctggcacattgaatgctcagcaatggtgaaaaagtatctcggtgaccagattgatatccatgcgggcggacaggatttaacattccctcaccatgaaaacgaaattgcgcaatctgaggcgctaacaggcaaaacgtttgcgaagtattggcttcataatggttatatcaatattgataatgaaaaaatgtcaaaatcactaggcaactttgtgcttgtgcatgacatcattaaacagcatgatccgcagcttttgagattctttatgctatctgttcattatcgccatccgattaactattcagaagagcttctggagaatacgaaaagcgcgttcaaccgtttaaaaacagcgtacagcaatcttcagcaccgtctgaacagcagtacgaatttaaccgaagatgacgatcaatggcttgaaaaagttgaagaacaccgcaaagcattcgaagaagcgatggacgatgattttaatacggcgaatgccatttcagtcttgtttgacttagcgaaacacgccaattattatcttcagaaagatcatacggctgatcatgtgattacggcgtttattgagatgtttgaccgcattgtttctgtcctcggtttttcgttgggtgagcaggaacttctcgatcaagagattgaagacttaatcgaaaagcgaaatgaagcgcgccggaatcgcgattttgcattgtcagaccagatccgcgaccagctgaaaagcatgaatatcattcttgaagatacggctcaaggcactcgctggaaacggggagaataacagatgcttgaatttgatacgataaaagattctaagcagcttaacggtcttgcgcttgcttatataggtgatgccatttttgaagtgtatgtcaggcatcacctgcttaagcagggctttaccaaaccaaatgatcttcataagaaatcaagccggattgtttcagcaaagtcacaggctgagatcctattttttctgcagaatcaatcattttttacggaagaagaggaagcggtgctgaaaagaggcagaaatgccaagtcagggacaacacctaaaaatacagatgttcagacgtaccgctacagtacagcatttgaagcgcttctgggctacctttttctagagaaaaaagaggaacgacttagtcagctcgtagccgaagctatacaattcgggacgtcagggaggaaaacaaatgagtcagcaacatgattacgtcatagggaaaaatgcagtgatcgagacgttaaaatctgatcggaagctgtataagctgtggatggcggaaaacaccgtaaagggacaagcacagcaagtgattgagcttgccaaaaagcagggaatcacgattcaatacgtcccgagaaaaaaactcgatcaaatggtgacaggacagcatcagggcgtagtggcacaggttgcagcgtatgaatatgcagaactggacgatttatataaagcagccgaagaaaaaaatgaacagcctttcttcctcattctggacgagcttgaagaccctcataatcttggttccattatgaggacagcagatgcggtcggcgctcatggcatcgtcattccaaaacggagagctgtcgggctgacaacaacagtggcaaaagcttcaacaggagcaattgagcacattcctgtagcaagagtcaccaatttggcacggacgttagaagagatgaaagagcggggaatctgggttgtcggaacggatgcgtccgcgcgtgaggattaccgtaatatggacggcaatatgcctttggctctagtcatcggaagtgaaggaaaagggatgggccgccttgtgaaagaaaagtgcgattttctcattaaactcccgatggccggaaaggtaacttcactaaatgcatctgtcgcggctggtcttttgatgtatgaagtctaccggaaacgaaaccctctgggagaataaagacccatggatatcctgttagtagacgggtacaacatgattggagcctggccgcagctgaaggatttaaaagcgaacagttttgaagaggcgagagacgtactgattcagaaaatggcggaatatcaatcgtatacaggaaacagggttattgttgtttttgacgcgcatctcgtaaaagggcttgagaaaaaacagaccaaccatagagttgaagtaatttttacaaaagaaaatgagacggctgatgagcggatagaaaagctcgctcaggctttgaataatattgcgactcaaattcacgttgcgacctctgactatactgagcagtgggcgattttcggacagggggcattgcggaaatcggcccgggagcttttgagagaggtagaaacgattgaaaggcgaatagagagacgggtaagaaaaatcacttccgaaaagccggcgggtaaaattgctttatcggaagaggttttgaaaacgtttgaaaagtggaggcggggagacttagattaagttgacgcttttttgcccaatactgtataatatttctatctacgtgcgccggggggatcggagtgaatctacagaacaacaagggaaaattcaacaaagagcagttttgccagttggaggacgagcaggtcattgaaaaggttcatgttggggacagtgatgcgttagattacttgattacgaagtaccgaaactttgttcgggcaaaagcaagatcctatttcttaataggggcggacagagaggatattgttcaggaaggcatgataggcctctataagtctattcgtgacttcaaagaggacaagcttacctcattcaaagctttcgcagaattatgtattacccgccaaattattaccgcaataaagacagctactcgccagaaacacattcctttgaattcctacgtctcattagataaaccgatttttgatgaagaatcagaccgaacgctgctggatgtcatttcaggagcgaaaaccttaaatcctgaggaaatgatcattaatcaggaagaatttgatgatattgaaatgaaaatgggagaactattaagtgatttagagagaaaagtactcgtcttatatctcgacgggagaagttaccaagagatttctgatgaactgaaccgacatgtgaaatcgatcgacaatgcccttcagcgtgtgaaacgcaagctggagaagtacttggaaattcgcgaaatcagtttgtaataggaatttatgctatattgacagtatttttctgactatgatatgttactaaagataagaactaatgtctatttagaaaaaggtgtaatgacatgagaaaaaagattacgttagcatgcaagacatgcggaaaccgtaattatacgacaatgaagagctctgcatcagcggctgagcgattagaagtaaagaaatactgcagtacttgcaattcacatacagctcatcttgaaacaaaatagtttttgcgcttttaaattgtggaggtcttttacatgcgtattatgaaattctttaaagatgttgggaaagaaatgaaaaaggtaagctggcctaaaggaaaagagttaacgcgttataccattacggtaatttcaacagttatcttttttgttatcttttttgccctccttgacacaggaatttctcaattaattcgtttaatagttgaataatgatcagcaatacgtgctataatagatcataatattacttgccaaaacccgttcagcgggttttttattgtggcttaaaatgaaagttatcataggcttgccgcctattttttgaagcgttatggtaattcactaaaaccaaatgcggggagggaaggactggacagtcctgaatagaatggaaaagaattggtatgttgttcacacgtactctggttatgagaataaagtaaaagccaacttggaaaagcgtgttgaatcaatggggatgcaggataaaattttccgtgtagtcgtacccgaagaagaagaaacggatatcaaaaacggcaagaaaaaagtcgtgaaaaagaaagtattccctggttatgtgcttgttgaaattgtaatgacagacgactcttggtatgtcgtccgcaacacgccgggcgttactggattcgtaggatctgccgggtcaggttcaaaaccgacgccgcttcttccgggggaagcagaaaccattctgaagagaatgggcatggatgaacgaaaaactgatattgactttgaactgaaagagacagtgaaagtgatagacggaccttttgctaactttacaggatcaattgaagagattgattatgataaaagcaaggtcaaagttttcgttaatatgtttggccgtgaaacgccggttgagctggaatttacccaaatcgataaattgtaatgtgaaaaaacttgaaattgctatatataaatgataatatagcaaaggtacgtcttggacttatccaaggcaactagcatgatatttcgtcattcatataaagaatgaaaccttgagtgggagggtttaccctattaccacatcacggacttaaggaggtgtgtctcgtggctaaaaaagtagttaaagttgtaaaattgcaaattcctgctggaaaagctaacccagcaccaccagttggacctgcacttggtcaagccggtgttaacatcatgggattctgtaaggagtttaacgctcgtacagctgaccaagctggtttaatcattcctgttgaaatttcggtttacgaagaccgttcatttacatttattacaaaaactccacctgctgcagtattgcttaaaaaagcagctggaattgagtctggttctggtgaaccaaaccgtaataaagtggcaaccgttaagcgcgataaagtacgcgaaatcgctgaaacgaaaatgcctgacttaaacgcagcagacgttgaagcggcaatgcgcatggttgaaggtactgcccgcagtatgggtattgtaatcgaggattaatttgtttcttgtcgggttgcgagttttaacaagttcgcaacccttattcgtgggaggttattccgctataaccacataaggaggaaattttaaaatggctaaaaaaggtaaaaagtacgttgaagctgctaagcttgtagaccgttctaaagcttacgacgtctctgaagcagtagctctcgttaaaaaaacaaacacagctaaattcgacgctacagttgaagtggctttccgtttaggggttgaccctcgtaaaaacgaccagcaaatccgtggagcagttgtgcttccaaacggaactggtaaaactcagcgcgttctcgttttcgcaaaaggcgaaaaagcgaaagaagctgaagctgctggtgcagatttcgtaggcgatactgactacatcaacaaaattcaacaaggctggttcgatttcgatgtaatcgtagctacacctgacatgatgggtgaagttggtaaaatcggtcgtgtacttggaccaaaaggtttaatgccaaaccctaaaactggtacagttactttcgaagttgaaaaagctatcggcgaaatcaaagctggtaaagttgaataccgcgttgataaagctggaaacattcatgttcctatcggtaaagtttctttcgaggatgaaaaacttgttgagaacttcacaacaatgtacgatacaatccttaaagctaaacctgctgcagctaaaggcgtttacgtgaaaaacgttgctgtaacttctactatgggacctggtgtcaaagtagactcttcaacttttaacgtaaaataatattgacatgacatcaacattctgatattattcaaaatgttgtaaaatagaatatcatttataccgtagacagtaggggcctaaccgcttaattatcctaccgaggtgtatattatcacagctattacgttacgtatgcttgtatatacagcctccatgtctcatggaggctttttatatggaatccgtcgtctcagtcgtgatcacctaacggtataagtgttacacaagaatctacaggaggtgtaaccatgagcagcgcaattgaaacaaaaaaagttgttgttgaagaaattgcttctaaactgaaagaaagtaaatcaacgatcatcgttgactatcgcggacttaacgtttctgaagtaactgaacttcgtaaacagcttcgcgaagctaacgttgagttcaaagtttacaaaaatacgatgactcgccgtgcggttgaacaagctgagcttaatggtttgaatgatttcttaactggaccgaacgcgatcgcattcagcactgaagatgttgtcgctccggctaaagttcttaatgacttcgctaaaaatcacgaagctcttgaaatcaaagctggcgttatcgaaggtaaagtttctactgttgaagaagtgaaagctcttgctgaacttccatcacgcgaaggcttgctttctatgttgcttagcgtacttcaagctccagttcgcaaccttgctcttgctgcaaaagctgtggcagaacaaaaggaagaacaaggcgcttaatctaatcagtttttcataaattaaaacaaaatggaggaattacaaatggctttaaatatcgaagaaatcattgcttccgttaaagaagcaactgtacttgaattgaacgacctagtaaaagcaatcgaagaagaatttggcgtaactgctgctgctcctgtagctgtagctggcggagctgctgctggcggagctgctgaagagcaaagcgaattcgatcttatccttgctggtgcaggatctcaaaaaatcaaagttatcaaagttgtacgtgaaatcactggtcttggcttgaaagaagctaaagaacttgttgacaacactccaaaaccacttaaagaaggtattgctaaagaagaagctgaagagcttaaagctaaacttgaagaagttggcgcttctgtagaagttaagtaatcttcacttacctgtaggggaagctcgcttttatgaggcgagctttttctttgccattctttaagccatgaaaaaaggaggttctaataatgagtgagcactattattcagaaaaaccttcagtaaaaagcaacaagcaaacctggtcttttaggcttcggaataaagatttcacgtttaccagcgacagcggggttttttctaaaaaagaagttgatttcggctcccgcctgctgattgattcttttgaagagcctgaggttgagggcagctttttggatgtaggctgcgggtacggcccgattggtttatcgctggccagcgactttaaagaccggactatccacatgattgacgttaatgagagagccgtagaactatcaaatgaaaatgcggaacataacggaataacaaacgttaagatttatcaaagtgatttgttttcaaacgttgattctgctcaaacatttgcttctattcttacaaatcccccaatccgagccggaaaaaaagttgtccatgctatctttgagaaaagcgctgaacacttaaaagcttcaggtgaattgtggatcgtcatacagaaaaagcaaggcgcgccttctgccattgaaaagctcgaggaactgttcgatgaagtttccgtcgttcaaaaaaagaaaggctattatatcataaaagcaaaaaaagtttgactcggtattttaactatgttaatattgtaaaatgccaatgtatatattttgcttgatatgatgaattgtcaatatctatgtataaattatacaagtatggaaatgctaataaaatcggtatttgtttttggatgtggttttcttaattagaaacccttttttcttttgtcttgtaaaagtattttctttctttggaagaaatgcttattacacatataatacgcatgatttgaggggtgaatcagttgacaggtcaactagttcagtatggacgacaccgccagcgcagaagctatgctcgcattagcgaagtgttagaattaccaaatctcattgaaattcaaacctcttcttatcagtggtttcttgatgagggtcttagagagatgtttcaagacatatcaccaattgaggatttcactggtaacctctctcttgagttcattgattatagtttaggtgagcctaaatatcctgtagaggaatcaaaagaacgtgatgtgacttactcagctccgctaagagtgaaggttcgtttaattaacaaagaaactggagaggtaaaagaccaagatgtcttcatgggtgatttccctattatgacagatacaggtacttttatcattaacggtgcggaacgtgttatcgtttcccagcttgttcggtctccaagtgtatatttcagtggtaaagtagacaaaaacggtaaaaaaggttttaccgcaactgtcattccaaaccgtggcgcatggttagaatacgaaactgatgcgaaagatgttgtttatgtccgcattgatcgcacacgtaagttgccggttacggttcttttgcgtgctctcggcttcggctccgatcaagagattcttgatctcataggagaaaacgaatacctgcgaaatacgcttgataaagataacacagaaaacagcgacaaagcgttgctggaaatttacgagcgtctccgtcctggagagccgcctacagtagaaaatgcgaaaagcttgcttgattctcgtttctttgatccgaaacgatacgatcttgccaatgtaggacgctataaaattaataaaaaacttcatattaagaatcgcctcttcaatcagagacttgctgaaacgcttgttgatcctgaaacaggagaaatccttgctgaaaaaggccagattcttgatagaagaacgcttgataaagtactgccatacttagaaaacggaatcggttttagaaagctgtatccgaatggcggcgttgttgaagatgaagtgactcttcaatcaattaaaatctttgctccgactgatcaagaaggagaacaggttatcaatgtaatcggcaatgcttacatcgaagaagagattaaaaacatcacgcctgctgatattatttcttcaatcagctacttcttcaacctgctgcacggagtaggcgacacagatgatatcgatcatcttggaaaccgccgtttacgttctgtaggcgagcttctccagaaccaattccgtatcggtttaagccgtatggagcgtgtggttcgtgagagaatgtcaattcaagatacgaatacaattacgcctcagcagctgatcaatattcgtcctgttattgcgtccattaaagagttctttggaagctcacagctttctcaattcatggatcagacgaacccgcttgctgaattaacgcacaagcgtcgtctgtcagcattaggaccgggcggattgacacgtgagcgtgccggaatggaagtgcgtgacgttcactactcccactatggccgtatgtgtccgattgaaacgcctgagggcccgaacatcggtttgatcaactcactatcatcttatgcaaaagtaaaccgttttggctttattgaaacgccatatcgccgcgttgaccctgaaacagggaaggtaacgggcagaatcgattacttaactgctgatgaagaggataactatgttgtcgctcaagcgaatgctcgtcttgatgacgaaggcgcctttattgatgacagcatcgtagctcgtttccgcggggagaacaccgttgtttccagaaatcgtgtagactacatggatgtatcgcctaagcaggttgtatctgctgcgacagcatgtatcccgttcttagaaaacgatgactccaaccgtgccctcatgggagcgaacatgcagcgtcaggctgtgcctttgatgcagccggaagcgccatttgttggaactggtatggaatacgtatcaggaaaagactctggtgccgctgttatttgtaaacaccctggtatcgttgaacgcgtagaagccaaaaacgtttgggttcgccgttatgaagaagtagacggtcaaaaagtaaaaggaaacctggataaatacagcctgctgaaatttgtccgctctaaccaaggtacgtgctacaaccagcgtccgatcgtaagtgtcggcgatgaagtggtaaaaggagaaatccttgctgacggtccttctatggagcttggtgaacttgcacttggccgtaacgtaatggtcggcttcatgacgtgggatggctacaactatgaggatgccatcatcatgagtgaacgcctagtgaaggatgatgtttatacatctatccacattgaagaatacgaatcagaagcacgtgatacgaaacttggacctgaagaaatcactcgcgatattccaaacgtcggtgaagatgcgcttcgcaatcttgatgaccgcggaatcatccgtattggggcagaagtaaaagacggagatcttcttgttggtaaagtaacgcctaaaggcgtaactgaactgactgccgaagaacgccttcttcacgccatctttggcgagaaagcccgcgaggttcgtgatacttctcttcgtgtgcctcatggcggcggcggaattatccatgacgttaaagtcttcaaccgtgaagacggagacgaacttcctccaggtgttaaccagttagtacgcgtatatatcgttcagaaacgtaagatttctgaaggggataaaatggccggtcgtcacggtaacaaaggtgttatctctaagattcttcctgaagaggatatgccttaccttcctgacggcacaccaattgatatcatgcttaacccgctgggcgtaccatcacgtatgaacatcgggcaggtattggaacttcacatgggtatggccgctcgttaccttggcattcacattgcatctcctgtatttgacggagcgcgagaagaggatgtctgggaaacacttgaagaagccggcatgtctcgtgacgccaaaacagtgctttacgacggacgtactggagagccgtttgataaccgtgtatctgtcggtatcatgtacatgatcaaactggctcacatggttgacgataaacttcatgcacgctctacaggtccttactcacttgttacgcagcagcctcttggcggtaaagcgcaatttggcggacagcgttttggtgagatggaggtttgggcacttgaagcttacggtgcggcttatactcttcaagaaattctgactgttaagtctgatgacgtggttggacgtgtgaaaacatacgaagccatcgttaaaggcgacaatgttcctgaaccaggtgttccggaatcattcaaagtattaatcaaagaacttcaaagcttaggtatggatgtcaaaatcctttctggtgatgaagaagaaatagaaatgagagatttagaagacgaagaagatgcgaaacaagctgacggcctggcattatcaggtgatgaagagccggaagaaacagcatctgcagacgttgaacgcgatgtagtaacaaaagaataatctctagttataaaggcaagtgacatcggttaatccgaagataaaaagggaggtaggccccttgctagatgtgaacaattttgagtatatgaacatcggtcttgcttcaccagataaaatccgttcatggtcttttggtgaagtgaaaaagcctgaaacgataaactatcgtacgttaaaacctgaaaaggacggtctattctgcgaacgcattttcggaccgactaaggactgggaatgtcattgcgggaagtacaagcgagttcgttataaaggcgtagtttgtgaccgctgcggagtcgaagtaacacgggctaaagtccgtcgtgagagaatggggcacattgaactggctgccccagtttcccacatttggtatttcaaaggtattccaagccgtatgggtcttgtgctggatatgtcacctcgtgctttagaagaagtcatttactttgcttcttacgttgtaactgatccggcgaatacaccgcttgaaaagaaacagcttctgtctgagaaagaatatcgtgcttatcttgataaatacggtaataaattccaagcatctatgggtgctgaagcaattcataaacttcttcaagatattgatcttgtaaaagaagttgatatgttaaaagaagagctgaaaacttcacaaggacaacgccgtactcgtgcgatcaaacgtcttgaagttttagaagccttccgtaactcaggaaacaagccttcttggatgatccttgatgtgcttcctgttattcctccggagcttagaccgatggttcagctagatggcggtcgttttgcgacttctgatttgaatgacctttatcgtcgtgtcatcaaccgtaacaatcgtttgaaacgccttttggaccttggtgcgcctagcatcatcgttcaaaacgaaaagcgtatgcttcaagaggctgtcgatgccctaattgacaacggccgccgcggacgccctgtaacaggtcctggtaacagaccgttaaaatctctttctcacatgctgaaagggaagcaaggccgtttccgtcaaaaccttcttggtaaacgtgttgattactccggacgttctgtaatcgttgttggtcctcatttgaaaatgtaccaatgcggattaccgaaggaaatggcgcttgaacttttcaaacctttcgttatgaaagaacttgttgaaaaaggtcttgctcacaacattaagagtgcgaaacgcaaaattgagcgcgtacagcctgaagtttgggatgtactagaatcagttattaaggagcatccggtactgctgaaccgtgcccctacacttcacagattaggtatccaggcgtttgaaccaacgcttgttgaaggacgcgcaatccgtcttcacccgctcgtatgtacagcttacaacgctgactttgacggtgaccaaatggcggttcacgtaccattatctgctgaagcacaagctgaagcacgcatcttgatgcttgctgctcaaaacatcttgaaccctaaagatggtaaaccggttgtaacaccgtctcaggatatggtactaggtaactattacctgacacttgagcgtgccggtgctgtcggtgaaggtatggtcttcaagaatacagacgaagcgcttcttgcttatcaaaacggatatgttcaccttcatacgagagtagctgttgcagctaactcacttaagaatgtgacatttaccgaagaacagcgctcaaaattgttaattacaactgtcggtaagcttgtcttcaatgaaattcttccggaatcattcccttacatgaatgaaccaacgaagagcaacattgaagagaaaacaccagaccgtttcttcttagaaaaaggtgctgatgttaaagctgttatcgcacagcagccaatcaatgcgccgtttaaaaaaggcattctgggtaaaatcatcgcggaaatctttaaacgattccatattacggaaacgtctaaaatgcttgaccgcatgaaaaacctaggtttcaaatattcaactaaagctggtattacagttggggtttctgacatcgtcgtactcgatgataaacaagaaattcttgaggaagcgcaaagcaaagttgacaacgttatgaagcaattccgccgcggtcttatcactgaagaagaacgctatgagagagtcatctctatctggagtgctgcaaaagacgttatccaaggcaaactgatgaaatcacttgatgaactcaacccgatctacatgatgagtgactctggtgcccgtggtaacgcatctaactttacgcagcttgccggaatgcgcggcctgatggccaacccggctggacgtatcattgagttgccgatcaaatcaagtttccgtgaaggtctgacagtattggagtactttatctccacacacggtgcgcgtaaaggtcttgccgataccgctcttaaaactgctgactcaggttaccttacacgccgtctcgttgacgttgctcaggatgttatcatccgtgaaactgattgcggaactgaccgaggcattcttgctaagcctcttaaagaaggaactgaaacaattgagcgcttagaagaacgcttaatcggacgttttgcaagaaaacaagtgaagcaccctgaaacaggtgaagtgcttgtgaatgaaaacgaactgatcgatgaagataaagcactggagattgtcgaagccggcattgaagaagtgtggatccgttctgccttcacatgtaatacgcctcatggtgtatgtaaacgatgctatggccgaaatcttgcaactggctccgatgttgaagtcggtgaagctgtcggaatcattgctgcccaatcaatcggtgagcctggtacacagttaacaatgcgtacattccatacaggcggggttgccggagatgacatcacacagggtcttccgcgtatccaagagcttttcgaagcgcgtaatccgaaaggtcaggcaacaattacagaaatcgacggtacagtcgttgagatcaatgaagttcgtgataagcaacaggaaattgtggttcaaggcgcagtggaaacacgttcttatacggcaccttacaactcccgcctgaaagtagcggaaggagataaaattactcgaggccaagtactgacagaaggttcaatcgatccgaaagaacttcttaaagtgactgacctgacgactgttcaagagtatcttctccatgaggttcaaaaggtttaccgtatgcagggtgttgaaatcggtgataaacacgtagaagtaatggttcgccagatgcttcgtaaagtacgcgtgattgatgccggtgacactgatgtgcttccaggtacattgcttgatattcaccaatttactgaagcgaacaaaaaggtattgcttgaaggcaatcgacctgctacaggccgtcctgtcttactcggtattacaaaagcatctcttgaaactgattcattcttatctgctgcttccttccaggaaacaacacgtgtccttacagatgcagcgatcaaaggtaagcgtgacgagcttctcggcttgaaagagaatgttatcatcggtaagcttgttccagctggtacaggaatgatgaaataccgtaaagtaaaaccagtatcaaatgttcagccgactgacgatatggtcccggttgaataactgatttaactctgctgaaagactgcaaaaacagtctttcagcagatatatttatgaaaaagtcactctatgagaagaacgaatctaaaaaatgtcataccttgttgacattcgtctcctagaatgataatataaccaaggtgctcgaaataaacctgttactttggaggatatgtttatgtcttatgataaagtatcacaggccaaatcaattattattggtacgaagcaaacagtgaaagctctaaagcgaggttcagtaaaggaagtagtcgttgcaaaagacgcagatccgatactcacgtcaagtgttgtttcacttgctgaagatcaaggtatctctgtctcaatggttgaatccatgaaaaagctcggcaaagcctgcggaattgaggtaggagcagccgctgttgccattattttataacgtacttttgtttttgcgtaagattccatcttgtgtaaagacattgttttttgccttttgatgaaccacctgggtatgtgggttataaaacgtaatgaagggaggaaaaattcatgcctacaattaatcagctaattcgcaaaggacgcgtgagtaaagtagaaaactcaaagtctcctgcacttaacaaaggatacaacagctttaaaaaagagcacactaacgtatcttctccacaaaaacgcggggtatgtactcgtgttggtacaatgacaccgaaaaaaccgaactcagcacttcgtaaatatgctcgtgttcgtttgactaacggaatcgaggttactgcttacattcctggtatcggtcacaacctacaagagcacagtgttgtacttatccgcggcggacgtgtaaaagacttaccaggggtacgttaccacatcgttcgtggtgcgcttgatactgctggagttgaaaaccgtgcacaaggccgttctaaatacggtacgaaaaaacctaaagcaaaataatatacgaaaatacgcataattgatgaagggaggatattcagatgccacgtaaaggtcctgtagcaaaaagagatgttttacctgatccgatttacaactctaagcttgtatctcgtttaatcaacaaaatgatgatcgatggtaaaaaaggtaagtctcaaacaatcctatacaagtcattcgatatcattaaagaacgtactggcaatgatgcaatggaggttttcgaacaagcattgaaaaacatcatgcctgtacttgaagtaaaagcacgccgtgtaggtggtgcgaactaccaagttcctgtagaagttcgtcctgaacgtcgtacgactcttggacttcgctggttagttaactacgctcgtcttcgcggagaaaaaacgatggaagagcgtttagctaacgaaatccttgacgcagctaacaacactggtgctgctgttaagaaacgtgaagacactcataagatggctgaagcaaacaaagcatttgctcactatcgctggtaggatttatagattaacaaaacacaatttcctaataaggaaggagaaattacccaatggcaagagagttctccttagaaaaaactcgtaatatcggtatcatggctcacatcgatgccggtaaaacgactactacagaacgtatcttgttctatactggtcgtatccacaaaattggtgaaactcatgaaggagcttcacaaatggactggatggagcaggaacaagaacgtggtatcacaatcacttccgctgcgacaactgcacagtggaaaggataccgcgtaaacatcatcgatactccaggacacgtagacttcacagttgaagttgaacgttctcttcgtgtacttgatggtgctgttgctgtacttgacgcgcaatcaggcgttgagcctcaaacagaaactgtttggcgtcaggcaacaacttatggagtaccgcgtatcgtttttgttaacaaaatggacaaaatcggtgcagacttcctttactctgtaggaactttaagagaccgtcttcaagcaaacgctcatgcaattcaattgccgatcggtgctgaagataacttcgaaggtatcattgaccttgtagaaaacgttgcgtatttctacgaagatgacctcggaactcgttctgatgcaaaagaaatccctgaagagtacaaagagcaagccgaagagcttcgcaacagccttattgaagctgtatgtgagcttgatgaagagcttatggataagtaccttgagggtgaagaaatcacaattgacgagttaaaagcaggaattcgtaaaggtacattaaatgttgaattctaccctgttcttgttggttctgccttcaaaaacaaaggtgttcaactagtacttgatgctgttcttgactaccttcctgcaccaactgacgttgctgcaatcaaaggtacacgtcctgatacaaatgaagagattgagcgtcattcttctgacgaagagccattctctgcattagcatttaaagttatgactgacccttacgttggtaagttgacgttcttccgtgtgtactctggaacacttgattctggttcatacgtgaaaaactctactaaaggcaaacgtgagcgtgttggacgtattcttcaaatgcacgctaacagccgtgaagaaatctctactgtatacgcaggggatatcgcagctgctgtaggtctaaaagatacaactactggagatactctatgtgatgagaaggatcttgttatccttgagtcaatggaattcccagaaccagttatcgacgttgctattgagcctaaatcaaaagctgaccaagataaaatgggtatcgctttagcgaaacttgctgaagaagatcctacattccgtactcaaacaaacccagaaactggccaaacgatcatctctggtatgggtgaacttcaccttgatatcattgttgaccgtatgaaacgcgaatttaaagtagaagccaatgttggtgctcctcaagttgcgtaccgtgaaacattccgtaccggtgctaaagttgaaggtaaattcgtacgtcagtctggtggacgcggtcagttcggacacgtttggatcgaattcgaaccaaacgaagaaggcgctggctttgaatttgaaaatgcgattgtcggtggggttgttcctcgtgaatacatcccagctgttcaagcaggtctggaagatgcacttgaaaatggtgtactagcaggcttcccgcttatcgacattaaagctaaacttttcgacggttcttaccatgatgttgactcaaacgaaatggcatttaaagttgctgcttctatggcattgaaaaatgcagtcagcaaatgtaacccagttcttcttgaaccaatcatgaaagtagaagtggttattccagaagaatacatgggagatatcatgggtgatattacttcacgtcgcggacgcgtagaaggtatggaagcacgcggtaacgctcaagttgttcgcgctatggttcctcttgctgaaatgttcggttacgctactgcacttcgttctaatacgcaaggtcgcggtacgttcactatgcacatggatcactacgaagaagtgccgaagagcgtcgcagaagaaattatcaaaaaaaataaaggcgaataattgattttgccgcttaactcaagtataactactattgtaagatgaggaagtgaaagctttctttcacttcctatcactctatacattactaattaaaagctcttaaggaggattttagaatggctaaagaaaaattcgaccgttccaaatcacatgccaatattggtacaattggacacgttgaccatggtaaaacaactttaactgctgctatcacaacagtacttcataagaaatctggtaaaggtacagctatggcgtacgatcaaattgatggtgctccagaagaacgcgagcgcggtatcacaatctctactgcacacgttgagtacgaaactgaaactcgtcactatgcacacgttgactgcccaggacacgctgactatgttaaaaacatgatcactggtgctgcgcaaatggacggagctatccttgtagtatctgctgctgatggcccaatgccacaaactcgtgagcacatccttctttctaaaaacgttggtgtaccatacatcgttgtattcttaaacaaatgcgacatggtagacgacgaagagcttcttgaactagttgaaatggaagttcgcgatcttcttagcgaatacgacttccctggtgatgatgtaccagttgttaaaggttctgctcttaaagctcttgaaggagacgctgagtgggaagctaaaatcttcgaacttatggatgcggttgatgagtacatcccaactccagaacgcgacactgaaaaaccattcatgatgccagttgaggacgtattctcaatcactggtcgtggtacagttgctactggccgtgtagaacgcggacaagttaaagtcggtgacgaagttgaaatcatcggtcttcaagaagagaacaagaaaacaactgttacaggtgttgaaatgttccgtaagcttcttgattacgctgaagctggtgacaacattggtgcccttcttcgcggtgtatctcgtgaagaaatccaacgtggtcaagtacttgctaaaccaggtacaatcactccacacagcaaattcaaagctgaagtttacgttctttctaaagaagagggtggacgtcatactccattcttctctaactaccgtcctcagttctacttccgtacaactgacgtaactggtatcatccatcttccagaaggcgtagaaatggttatgcctggagataacactgaaatgaacgttgaacttatttctacaatcgctatcgaagaaggaactcgtttctctattcgtgaaggcggacgtactgttggttcaggcgttgtttctacaatcactgagtaatagtatgattttaaacgagacccctgcgggtctcgttttttgtttgcttatctttttcttgtataataggatctatcatattcgaggggttaatatttatgattcctgaaaagaaatcaatcgcaatcatgaaagaactaagcattggaaatacaaagcaaatgctgatgattaatggagttgacgtggaaaatccattgttgctttttttacatggcgggccgggaacgccgcaaatcggatatgttagacattatcaaaaagagctggaactgtattttacagtagttcattgggatcagagaggatcggggctttcttattctaagcgaatttcgcatcactctatgacaataaatcacttcattaaagatacaatccaagtcactcaatggcttttagctcatttttcaaaatcaaaactttacctagccggtcattcttgggggtcaatactggcgcttcatgttttgcagcagtgtcctgatttattttacgcgtattatggaatcagccaggttgttaaccctcatgatgaagaatcaactgcttatcaacatattcgtgaaatttctgaatcaaaaaatgccagcttattatctttcctcacacgtttcattggtgctccgccttggaagcaggatatccagcaccttatctatcggttttgtgtcgagctaagcaggggaggcttcactcgccgtcatcgtcaatctctagctgtattatttcaaatgcttactggcaatgagtatggagtgcggaacatgcacagcttcctcaatggattgcgcttcagtaaaaaacatttaactggtgagttgtaccggtttaatgcttttacatcagttccttctattaaagtaccgtgtgttttcatttcagggaaacatgacttaattgttcctgctgaaatatcgaaacagtattatcaagagcttgaggcacccgaaaagcgctggtttcaatttgagaactcagctcacaccccgcatattgaggagccggcattattcgcgaacacattaagtcgacatgcacgacaccatttatgatagatccttgataaataagaaaaacccctgtataataaaaaaagtgtgcaaaccatgcatattttaaataagtcttgcaacatgcgcctattttctgtataatggtgtatgttggtctttgactgcgatgaagtgagaggttgctgacacacccggccgctttgccatggcaaggtgttcaggtttttctcacggagaactgtctaacgtgatgtaggcgaaaaggagggaaaataatggcaaaacaaaaaattcgtattcgtttgaaagcatatgatcatagaatccttgatcaatctgcagagaagattgttgaaacggcaaaacgttctggtgccagcgtatctggtccgattccgttgccaactgaaaaatcagtttacacaatccttcgtgcggtgcacaaatacaaagattctcgtgagcaatttgaaatgcgtacacataaacgtttaatcgacattgtgaacccaacaccacaaactgttgatgctcttatgcgattagacttaccatctggtgtcgatatcgaaattaaactttaattctaaaatatagaatgatcttaataggaggtgtgacgaatgaccaaaggaatcttaggaagaaaaattggtatgacgcaagtattcgctgagaatggtgatcttattccggtaactgttatcgaggctgctccaaacgttgttcttcaaaagaaaacagctgaaaacgacggttacgaagcaatccagcttggttttgacgacaagcgtgaaaagctttctaacaaacctgaaaaagggcacgttgcaaaagcggaaactgctcctaagcgcttcgttaaagaattacgcggagtggaaatggatgcgtatgaagttggtcaggaagtcaaggttgaaattttctctgctggagaaatcgtagatgtaacaggagtatctaaaggtaaaggtttccaaggtgcgatcaagcgccacggacaatctcgcggacctatgtctcacggttcacgctaccaccgtcgtcctggttcaatgggacctgtagatcctaaccgtgtattcaaaggtaaattattacctggacgtatgggcggagagcaaatcactgttcaaaaccttgaaatcgtaaaagttgatgcagaacgcaatcttcttttgatcaaaggtaacgtacctggtgcgaagaaatctttaatcactgttaaaagtgctgttaaatctaaataattctcttaggaaaggaggaaattgattatgccaaaagtagcattatacaaccaaaacggttctactgctggtgacatcgaattaaacgcttctgtatttggtatcgaaccaaatgagagtgttgtattcgacgctattcttatgcaaagagcttccttacgtcaaggaactcacaaagtaaaaaatcgttctgaagtacgcggcggaggtcgtaaaccatggcgtcaaaaaggtactggacgtgcccgtcaaggttcaatccgttcaccgcaatggcgcggaggtggtgtcgtattcggcccaacaccacgcagctattcttataaattacctaaaaaagttcgccgcttggcaatcaaatcagtattgtcttctaaagtgatcgacaacaacatcatcgttcttgaagatcttactcttgatacggctaaaacaaaagaaatggcagctatccttaaaggattatctgttgagaaaaaagctttaatcgtaactgcggatgcaaacgaagcagtagctttatctgctcgtaacattcctggagttactgttgttgaagctaacggaatcaacgttttagacgttgtcaaccacgagaagcttctgattacaaaagcagcggttgaaaaagtagaggaggtgcttgcataatgaaagatcctcgtgatgttctaaagcgccccgtcattactgaacgttctgctgatttaatgactgaaaagaaatatacttttgaagttgatgtaagagctaacaaaacagaagtgaaagacgcggttgaaagcatctttggagtgaaagttgacaaagtcaacatcatgaactacaaaggtaaatcaaaacgtgttggacgctacactggtatgactagccgtcgcagaaaagcgatcgtaaaacttactgcagacagcaaagaaatcgaaatttttgaagcttaattatctgtaaaaagaaggagggaaattcaaaatggcgattaaaaagtataaaccgacctctaatggacgtcgtggcatgacaacttcagattttgctgaaatcacgactgacaagccggaaaaatccttgcttgctccccttcacaaaaaaggcggacgtaacaaccaaggtaaattgactgtacgtcaccaaggtggcggacataaacgccaataccgtgttatcgacttcaaacgcgataaagatggtatacctggacgcgttgctacagttgaatacgatccaaaccgttcagctaacatcgctctaatcaactatgcagacggagaaaaacgttacattcttgctcctaaaggaattcaagtaggtactgaaatcatgtcaggtcctgaagctgacattaaagtaggtaatgcacttccacttatcaacatccctgttggtacagttgtgcataacattgaattaaaacctggtaaaggcggacagcttgtacgttcagctggtacatctgctcaggttcttggtaaagaaggtaaatacgttcttgtacgtcttaactctggtgaagttcgcatgatcctttctgcttgccgtgcttctatcggtcaagtaggtaacgaacagcacgaacttatcaacattggtaaagctggacgttctcgctggaaaggcatccgtcctacagttcgtggttctgtaatgaaccctaacgatcacccacacggtggtggtgaaggacgtgcgccaatcggacgtaaatcaccaatgtctccatggggcaaacctactcttggattcaagactcgtaagaaaaagaacaaatccgataaatttatcgtacgtcgtcgtaaaaataaataacggggttgtctacggttcttttcggaccgtagtgcaatcacgaagggaggttccaaaatggctcgcagcttaaaaaaaggaccatttgtcgatggacacttgatgactaaaatcgagaaattaaatgaaacagacaagaaacaagtcgtaaaaacttggtctcgtcgttctactattttcccacagtttattggtcacacaatcgcagtctatgacggacgtaaacacgtgcctgtattcatctctgaagatatggtagggcacaagttgggtgaattcgctccaactcgtacgtacaaaggtcatgctagtgatgacaaaaaaacaagacgctaagagaggaggcttttaaatgcaagctaaagctgttgcaagaacagtccgtattgctcctcgtaaagcacgtctagtaatggacctgattcgaggcaagcaagtaggtgaggcagtatcaatcttgaaccttacaccaagagctgcttctccaattatcgagaaagtattaaaatccgctattgcaaatgctgagcataactatgaaatggacgctaacaacctggttatttctcaagcattcgttgacgaaggccctacgttaaaaagattccgcccacgtgctatgggacgtgcgagccaaatcaacaaacgtacgagccacattacaatcgttgtatcagaaaagaaggagggataagtagtgggtcaaaaggtaaatccagtcggtcttcgtatcggagtcattcgtgattgggaatctaagtggtacgctggtaaagattacgctgacttcctgcacgaagatttaaaaattcgtgaatacattagcaaacgcctttctgacgcttctgtttctaaagtagaaatcgagcgtgcagcaaaccgcgttaacattacgatccacacagctaagcctggtatggttatcggtaaaggcggttctgaagtcgaagcacttcgcaaagcccttaacagccttactggcaagcgtgtacacattaacattcttgaaatcaaaagagcagatcttgatgcacagctagttgctgacaacatcgctcgtcaattagaaaaccgtgtttctttccgccgtgcgcagaaacaacaaatccaacgtactatgcgtgctggagcacaaggtgtgaaaacaatggtttctggtcgtcttggcggtgcagatatcgctcgttctgaatactacagtgaaggaactgttccattgcacacattacgtgcggacattgactatgcaacatctgaagctgatactacttacggtaagcttggtgtaaaagtctggatctatcgtggagaggttcttcctactaagaagaaaactgaggaaggaggaaaataatatgttattaccaaaacgcgttaaatatcgcagagagcatcgcggaaaaatgcgtggccgtgcgaaaggcggtactgaagtacatttcggagaattcggtatccaagctcttgaagcttcttggattactaaccgtcaaatcgaagctgcacgtattgcgatgactcgttacatgaaacgtggcggtaaagtttggatcaaaattttcccttctaaaccttacactgctaaaccacttgaggtacgtatgggatccggtaaaggggctccagaaggttgggtagctgttgtaaaaccgggcaaagttttatttgaaatttctggtgtgtctgaagaggttgctcgtgaagcgcttcgccttgcatctcacaaattgccaattaaaacgaagttcgtaaaacgtgaagaaattggtggtgaatcaaatgaaagctaatgaaattcgtgaccttaccactgctgaaattgaacaaaaagtaaagtctcttaaagaagaacttttcaatcttcgctttcaattagcgacaggacaacttgaaaatactgctcgcattcgtgaagtgcgcaaagctatcgcgcgcatgaaaactgtgattcgtgaaagagaaattgctgctaataaataatcactgaggggaggtcgtgagcatgagcgaacgtaaccaacgcaaagtttaccaaggccgtgttgtttctgacaaaatggataaaaccattactgttgttgttgagacatacaaaaaacatacactttacggtaaacgcgtaaaatactcaaaaaaattcaaagcacatgatgaaaataatcaagctaaaatcggtgacatcgttaagatcatggaaactcgtccattgtctgcaactaagcgtttccgtctagttgaagttgtcgaagaagctgttattatctaataaagttcggaattctttttccgaagggaggtaacaaataatgattcaacaagagactcgtttaaaagtagctgacaactctggcgcacgtgaagtacttactattaaagttcttggtggttctggacgtaaaacagctaacattggtgatgtaattgtttgcacggttaaacaagcaacaccaggaggcgttgtcaaaaaaggtgaagtcgtaaaagctgttatcgttcgcactaaaagcggagcgcgcagaagtgacggttcatacatcagcttcgatgagaatgcatgtgttatcatccgtgacgacaagagcccacgcggaactcgtatcttcggaccagttgctcgtgaattgcgtgaaaacaactttatgaaaattgtttctctagctccagaagttatctaatgaaataaatgccttactcaaggaggtgcgatcaggatgcatgtaaaaaaaggcgataaagttatggttatctctggtaaagataaaggcaaacaaggaacaatccttgctgctttccctaaaaaggaccgcgttttagttgaaggtgttaacatggtaaagaaacactctaaaccaactcaagctaaccctcaaggcggtatttctaatcaagaggcgccaattcatgtatcaaacgttatgccgctcgatcctaaaacaggtgaagtgactcgcgtaggatacaaagtggaagatggcaaaaaagttcgtgtagcaaaaaaatctgggcaagttctagataaatagtattaaaaggaagggaggtctatctcatgaaccgccttaaagaaaagtacaataaagaaattgcacctgctttaatgactaagttcaattatgattcagtcatgcaagtgcctaaaatcgaaaaaatcgtaatcaacatgggtgttggtgacgctgttcaaaacgccaaagcaatcgacagtgctgttgaagaattaacgtttatcgcaggtcaaaaacctgtcgttactcgtgcgaagaaatcaattgctggattccgtcttcgtgagggaatgcctatcggtgcgaaagtaactcttcgcggagagcgcatgtatgatttccttgataaacttatttctgtatctttaccgcgtgtacgtgacttccgcggggtttctaaaaaatctttcgacggtcgcggtaactacacacttggtatcaaagaacagttaatcttccctgaaattgactacgataaagtaacaaaggttcgcggaatggacatcgttatcgtaacaactgctaatactgacgaagaagctcgtgagctattaactcaagtaggtatgccgttccagaaataatcaatgaaagggaggcgaaatcgtggctaaaaagtctatgattgcgaaacaacaacgtacaccaaagtttaaagtacaagagtacacacgctgtgaacgctgcggacgtccgcattcagtcattcgtaaatttaaactttgccgtatttgtttccgtgagcttgcatataaaggacaaattcctggcgtgaaaaaagccagctggtaatccccaagaaagggaaggaggtaattatataatggttatgacagatccaattgcagatatgctaactcgtattcgcaatgcaaacatggtacgtcatgagaagcttgaaattcctgcttctaaattgaaaagagaaattgctgaaattttaaagcgtgaaggtttcattcgtgacgttgagttcgtagaagacagcaaacaaggtatcatccgcgttttcttgaaatacggacaaaacaacgagcgcgttatcactggtcttaaaagaatcagcaagcctggtttgcgtgtttatgctaaatctaatgaagtaccccgcgtacttaacggtcttggaatcgcgattatttctacatcacaaggtgttttaacggacaaagaagcccgtgcaaaacaagctggtggagaagttctagcatacgtttggtaagaagtttaacatgaatggaggtgtttggtatgtctcgtgtaggtaagaagctacttgagattccttctgatgttacagtaacgttaaatgataacaacactgtagctgtgaaaggaccaaaaggagaattaactcgtacgtttcaccctgatatggagattaaagtagaggacaatgtgcttacagtcgctcgtccttctgatcaaaaagagcaccgtgccctgcatggtacgactcgcagtctgcttggcaacatggttgaaggtgtatctaaaggatttgaaagaggtttggaattagtcggtgtcggttaccgtgcttctaaatccggaaataaacttgttttaaacgttggatactctcatcctgttgagatcgttcctgaagaaggcatcgaaatcgaagttccttctcaaacaaaagtagttgtaaaaggtacagacaaagaacgcgtaggagctattgctgctaacatccgcgctgtacgttctccagagccttacaaaggtaaaggaatccgctacgaaggtgaagttgttcgccgtaaagaaggtaaatctgctaagtaagatcgcttaaagtgaagaaaggagtgacctagatgattacgaaaactagcaaaaatgctgctcgtcttaaaagacacgctcgtgttcgcgctaaactttccggtactgctgaaagaccgcgcctgaacgttttccgttctaacaagcacatttacgctcaaatcatcgatgatgtaaatggtgtaacacttgctagtgcatctactctcgataaagacttgaacgttgaaagcactggagatacttctgctgctactaaagttggagaattagttgcaaaacgcgctgctgaaaaaggcatttctgacgtagtatttgaccgtggcggatacttataccatggacgtgtaaaagctttggctgatgccgctcgtgaagctggacttaaattttaataaaagaaggagggacacatgattatgcgtcgtattgacccaagcaaattagagttagaagaacgcttagttacggttaaccgcgtagcgaaagttgttaaaggtggtcgtcgtttccgcttcgcagctctagtcgttgtcggtgacaaaaacggacacgtaggattcggtactggtaaagcacaagaagtaccagaagcgatccgcaaagctgttgaagatgcgaaaaagaatttgattgaagtaccaatggttggaactacaattccacacgaaatcatcggacgtttcggtgcaggtaacatcttgttaaaacctgcttctgaaggtactggagttatcgctggaggccctgtacgtgcggtacttgagctagctggtgtagctgatatcctttctaagtctttaggttctaacacaccgatcaacatgattcgtgcaacacttcaaggtttaagtgagcttaaacgtgctgaagacgttgcgaagcttcgtggaaaatctgtagaagaactgttaggataaggagggaacattaatggctaaattagaaattaccctcaaacgaagtgtaatcggtcgcccggaagaccaacgcgttactgtaagaacacttggtttaaagaaaacaaaccaaactgttgttcatgaagacaacgctgcgatccgtggtatgattaataaagtatctcatttagtttctgttaaagaacaataaaaatatttgatcggataaggaggtgtcctaatgaaacttcatgaattaaaaccttcagaaggttcacgtaaaacgcgtaatcgcgtaggtcgtggtattggttctggcaacggtaaaacagctggtaaaggtcacaaaggtcaaaacgctcgttctggcggcggtgtacgccctggattcgaggggggacaaatgcctttattccaacgtcttcctaaacgcggtttcactaacatcaaccgcaaggaatacgctgtagtcaacctagacaaattgaacggttttgcagaaggaacggaagtcactcctgaacttcttctagagactggtgttattagcaaacttaatgcaggagtaaagattcttggcaacggtaaattagagaaaaaattaactgtaaaagccaataaattctctgcttctgcgaaagaagctgttgaagctgctggcggtacagctgaggtgatctaacttgtttaaaacaatctccaactttatgcgtgtgagtgatatcaggaataaaatcatattcactttactcatgcttatcgtctttcgcataggtgcgtttattcctgtgccttacgttaacgctgaagcgttacaggcacagtctcaaatgggtgtttttgatctccttaatacatttggcggcggtgcgctttaccaattttccattttcgcaatgggaattactccttatatcacggcttcgatcatcattcagctgcttcagatggatgtggtaccgaagtttaccgagtggtctaagcaaggtgaagttggccgccgtaaattagctcagttcacaaggtactttacgattgtgcttggtttcatccaagcgttaggtatgtcatatggattcaacaatctggcaaacggtatgctgatcgaaaaatccggtgtatcgacatatcttatcattgctttagtgctcactggcggaactgcctttttaatgtggcttggggaacaaattacttctcatggagtaggcaacggaatatcgatcattatcttcgcggggattgtgtctagtattccaaaaacaattgggcaaatatatgagactcaatttgtcggcagcaacgatcagttgtttattcatattgtgaaagtcgcacttcttgtgattgcgattttagcagttattgttggagttattttcattcagcaagccgtacggaaaattgcgattcaatatgctaaaggcacaggtcgttcacctgctggcggaggtcagtctacacaccttccattgaaagtgaatcctgcaggggttattccggtaatctttgcggttgcgtttttgataacgccgcggacgatcgcgtcattctttggaacaaacgatgtgacaaagtggattcaaaacaactttgataatacgcatccggtgggtatggcgatatatgttgcgttgattattgcctttacgtacttttatgcttttgtacaggtaaaccctgaacaaatggctgataaccttaaaaaacagggtggctatatcccgggggttcgtccagggaaaatgactcaagatagaattacgagcattttgtatcgacttacgtttgtgggttctatattcttagccgtgatttccattcttcctatctttttcattcaattcgctggattgcctcaaagtgcacaaattggcggaacatctttgttaattgttgtcggggtagccttggagacaatgaaacaactagaaagccagttggtgaaacgaaactaccgtggatttatgaaaaactagaggaaatggatttatccattccctcttaataaagagaggacgggggaaatccgaatgaacttagtcttaatggggcttcctggtgccggtaaaggcacacagggcgaacgaattgttgaggattatgggattcctcatatctcaacaggagatatgttccgtgctgctatgaaagaagaaacaccactcggactcgaagcaaaatcttatattgataagggagagctcgtacctgacgaagtcacaatcggaattgtaaaagagagacttggcaaagatgattgtgaaagaggttttcttctggacggatttccgcgaacagtcgctcaagccgaagctcttgaagaaattcttgaggaatacggcaagccgattgattatgtcattaacattgaagtcgacaaagatgttctgatggaacgtctgactggacgcagaatttgcagtgtttgcggcacaacctatcatttagtctttaatccgccgaaaacgccgggtatttgtgataaagacggaggcgaactctatcaacgggcagatgataatgaggaaacagtctctaaacggcttgaggtaaacatgaagcaaactcagcctttactcgatttctattcagagaaaggttatcttgcaaacgtgaatggccagcaggacattcaagacgtttatgcagatgtgaaggatcttcttggaggattaaaaaaatgattatctgtaaaaccccacgtgaacttggtatcatgcgggaagcagggcgaatcgtggctttaactcatgaagagttaaaaaagcacattaaaccaggaatctcgacaaaagaattggatcaaattgccgaacgttttattaagaagcagggtgcaatcccatcttttaaggggtataatgggtttcgcgggagcatttgcgtatcagttaatgaagaactcgttcacggcatacctggcagcagggtgctgaaggacggtgacatcatcagtattgatatcggtgctaaattaaatggttatcatggtgactctgcatggacatatccggtaggaaacatcagcgatgatgacaaaaaacttctggaagtgacagaggagtctttatataaaggcttgcaggaagcaaaaccaggtgaacgtttgtcgaatatttcccacgcaatacaaacgtatgtcgaaaatgagcagttttcagttgttagggagtatgtcggacatggtgttggtcaagacttgcatgaggacccgcaaattcctcattacggtccgcccaacaaaggaccacggcttaaacctggcatggttctcgctattgaacctatggtgaacgctggcagccgctacgtgaaaacattggctgataactggacggttgtaacggtagatgggaaaaagtgtgctcattttgaacatacgattgcgattacggaaacgggttttgatatactgacgagagtctagatgatgaaaataattccgaagacagatgtttttcaagcttgatagggcagaaagcttgggtgaacattggcaagaccgaattcatcttgctgcttgtcgttggaattttaaccatcatcaatgtactaacagcagacggagaaaagcgtacatttcattctcctaagaaaaagaatatcaatcatttaaccctttatgattgcgtatctccggaagttcagaacagtataaacgaaacagggcgtgtgacaaacttcttttgaaatttgtcagaaagcaagttactgatttgaagaagggagaacacttgaatggcgaaagacgatgtaattgaagtggaaggtactatagtcgaaacactgccaaacgcgatgttcaaagttgaacttgaaaatggccacactgttttggctcatgtatctggtaaaatccgcatgcacttcattcgcattttacctggagacaaagttacggtagaattatctccatatgacttaactcgtggcaggattacgtaccgttacaaataaagcactccggaaactgaaggaggttggaaacacatgaaagtgagaccatcagttaaaccaatctgcgaaaaatgtaaagttattcgcagaaaaggaaaagtaatggtgatctgtgaaaatccaaagcataaacaaaaacaaggataatttataaggaggtgcccagagaatggctcgtattgctggtgtagatatcccacgtgacaaacgtgttgttatttctttaacatacatcttcggaattggccgcacaacggctcagcaagttttaaaagaagctggagtttcagaagatactcgtgtgcgcgatcttactgaagaagaacttggtaaaatccgtgatattattgacaaactgaaagtagaaggtgaccttcgccgtgaagtttctcttaatatcaaacgtctgatcgaaatcggaagctaccgcggaatccgtcatcgcagaggattacctgttcgcggacaaaactctaaaaacaacgcgcgtactcgtaaaggtccgcgtcgtactgtagctaacaagaaaaaataagtaagggaggttcttaaacaatggctgctgctcgtaaatctaacacgcgtaaacgtcgcgtgaaaaagaatattgagtctggaattgctcatattcgttcaactttcaataacacgatcgttacgatcactgacactcatggtaatgctatttcttggtctagtgccggagctttaggattcagaggttctcgtaaatctactccttttgctgcgcaaatggctgcagaaacagctgctaaaggttcaatcgaacatggtcttaaaactctagaggttactgttaaaggacctggttcaggccgtgaagctgcaatccgtgcacttcaagctgctggactagaagtcactgctatcagagacgtaactcctgttcctcataacggatgccgtccaccaaaacgtcgccgcgtgtaatttgtttgtatagattttgtgtccctgtcaataatgggttatgatacagttatttatgaaacgaatgcaccgactcgttgcctgagcacatacgggactaaacaatggggaatttcggatggaatctcatatgattctattcgaggtttcgacgttttgaaggagggttttaagtaatgatcgagattgaaaaaccaaaaatcgaaacggttgaaatcagcgacgatgccaaatttggtaagtttgtcgtagagccacttgagcgtggatatggtacaactctgggtaactccttacgtcgtatcctcttatcctcactccctggtgccgctgtaacatcaatccagatagatggtgtactgcacgaattctcgacaattgaaggcgttgtggaagatgttacaacgattatcttacacattaaaaagcttgcattgaaaatctactctgatgaagagaagacgctagaaattgatgtacagggtgaaggaactgtaacggcagctgatattacacacgatagtgatgtagagatcttaaatcctgatcttcatatcgcgactcttggtgagaatgcgagtttccgagttcgccttactgctcaaagaggacgtgggtatacgcctgctgacgcaaacaagagagacgatcagccaatcggcgtgattccgatcgattctatctatacgccagtttctcgtgtatcttatcaggtagagaacactcgtgtaggccaagttgcaaactatgataaacttacacttgatgtttggactgatggaagcactggaccgaaagaagcaattgcgcttggttcaaagattttaactgaacaccttaatatattcgttggtttaactgacgaagctcaacatgctgaaatcatggttgaaaaagaagaagatcaaaaagagaaagttcttgaaatgacaattgaagaattggatctttctgttcgttcttacaactgcttaaagcgtgcgggtattaacacggttcaagagcttgcgaacaagacggaagaagatatgatgaaagttcgaaatctaggacgcaaatcacttgaagaagtgaaagcgaaactagaagaacttggactcggacttcgcaaagacgattgactagtttcccttgtgaactaggattttcgtgtgtttattattcagaaacagcattccaataaaggaggggacatcacatgtcatacagaaaactaggacgtacgagtgcacagcgtaaagctatgcttcgtgatcttacaactgatttgatcatcaacgaaagaatcgaaacaactgaaacacgtgcgaaagaacttcgctctgtagttgaaaaaatgatcacgcttggcaaacgcggtgatcttcacgctcgccgtcaagctgctgcatacatccgcaacgaggttgcaaacgaagaaaataaccaagatgcacttcaaaaattattctctgacattgcaactcgttacgaggagcgccaaggcggatacacacgtattatgaagcttggtcctcgccgtggtgacggagcaccaatggcaattatcgaattggtttaatcacatatttttgtgtatctaaagaagggcgggacagtttctaactggatctatgccctttttttagatactgcaacttttaatagagagaaaagcagagcattagctgagaggaggccggttttccatgaatcaaaatcagttgatatcggtagaggatatcgtatttcgatatcggaaggacgcagaaagacgagcactagacggcgtctccctgcaggtgtatgagggtgaatggcttgcaatcgtaggtcataacggttcagggaaatcaacactggcccgggcattgaatggtttaattcttcctgaatcaggcgacattgaggttgccgggattcaattgacagaggaatctgtttgggaagtgcgtaagaagataggtatggtctttcaaaatccggataaccaatttgtcggaacgactgttcgcgatgatgtggcttttggtttagaaaacaatggtgtaccgcgggaagaaatgattgagagagtagactgggcagtaaaacaggtgaatatgcaagattttctcgatcaagagccgcaccatctctccggaggccaaaagcagagagttgcgattgcgggggttattgccgcacgtcctgatattattatcttagatgaagcaacatccatgcttgatccgatcgggcgagaagaagtgcttgaaacggtaagacatttaaaagagcagggcatggcgactgtcatatccattacacatgatctgaatgaggcagcaaaagcagacaggatcattgtcatgaatggcggtaaaaaatatgctgaagggccgcctgaagagatttttaaattgaataaagaacttgttcgaattgggcttgatttacccttctcattccagcttagccagcttttaagagaaaatggactggctttggaagaaaaccatttgactcaggaagggctggtgaaagagctgtggacattacaatcaaagatgtagagcatcgctatcagatgaagacgccgtttgagcgcctagcactgtatgatatcaatgcatcgattaaagaaggaagctacgtagccgttatcgggcatacaggctctggcaagtccactcttcttcagcacctaaatggtctcctgaagccgacgaagggacagatatcactaggcagcactgtcattcaggcagggaaaaagaataaagatctgaaaaaacttcgtaaaaaagtcggaatcgttttccaatttcctgagcatcaattattcgaagaaacagttcttaaagatatttcattcggaccgatgaactttggtgttaaaaaagaagatgctgaacaaaaagcgagagagatgctgcagcttgtaggtttatcagaagagcttttggacaggtcaccctttgaattaagcgggggacaaatgcgcagagttgcaattgccggcgtacttgcaatggaccctgaagtgcttgttctcgatgaaccgactgcaggattggacccaagagggcgaaaagagattatggacatgttttatgagcttcatcaacgtgggaacctgacgacgatccttgtgacacacagcatggaggatgcagctgcatacgctgatgaaatgattgttatgcataaaggaatgatacaagcatcaggcagtccgcgtgatctgtttttaaagggtgaagagatggccggctgggggctggatcttcctgaaacaataaaattccaaagacaccttgaagctgtactgggtgtgagatttaatgagcctatgctcacaatcgaagatgccgctgccaaaatccgtgctctttttcagggggagaagactttatgatggacagcatgattatcggcaagtatgtaccgggtacttcacttgtgcaccggcttgaccccagaacaaaactgatcacgatctttttatttgtctgcatcgtattcttagccaataatgttcagacatatgcgttgcttggtttatttacaattggcgtcgtttctttaacaagagttcctttctcttttttaatgaaagggctgaagccaatcatctggattgtcctttttacgttccttcttcacatccttatgacacatgaaggaccgattatctttcaaataggttttttcaaagtctatgagggcggtctggttcaggggatattcatttctcttagattcgtctatttgattttaatcacaaccttattaacgcttacgaccacaccgattgagattaccgatggaatggaacagctgctgaacccattgaaaaaattaaagcttcctgttcatgagctggctcttatgatgtcaatttctttacggtttattccgacactgatggaggagacagataagatcatgaaggctcagatggcgcgaggcgttgattttacaagcgggcctgtcaaagatagagtgaaggctattgtcccgcttcttgtcccgctcttcgtcagcgcatttaaacgcgccgaagagcttgcggtggcaatggaagcaagaggctatcaaggcggagaaggacgtacgaaatatagaaagcttgtatggacaggaaaagacacttctgtcattgtcagcttaattgtattagctgctttgttatttttcttaagggcttagaggtgctgtatgagactgaaatgcacgatttcttatgacggacatttgtttaacggttatcaggttcagccgggcaaaagaacggttcaggatgaactggagaaggctttggctgtcctgcataagtcaaaagacagaattccggttgtttcgtctggaagaacagacagcggggttcacgcagccggacaggtgattcattttgacactccgctgtctatcccggctgagagatggccatatgccttaaatgcactgcttccggacgatatcgcagtcaaacaggcagaaattgcggatgatgggttccatgcacgatttagcgcagtcaaaaaagaatatcgctactttgtatacacggagaaacacccggacgtatttaaacggcattacgcttaccatttttcatatcgccttaatgtgcaggacatgagagaagcggcaaagcatcttatagggacacatgattttacgagcttttgcgcggctaaaacagaagtgcaggacaaggtaagaacgatatacgaacttgattggactgagacggctgacggcctgcaaatgcggatcacaggcagcggtttcttatataatatggtcagaattattgcgggtactttgcttgatgcaggtattggaaaaatttctcccgatgaggtgaaatccatgctggaagcgaaggatcgcgaagcggcagggcgcacagcgccggggcacgggctatatttatggaacgtttactatgacaactaaaccaggtgtataatattttcttgacagagtctgcataaagttataagatatcatatggtatgtatttcaaccccacgataagccccggaacttattgtgttgtgaaatagaacgtaatcgaagtttattgaaaatgacagatcatttaggagggaaattcaatgcgtacaacacctatggctaacgcaagtactattgaacgcaagtggttagttgttgatgctgctggcaagactttaggtcgtctttcttcagaagttgcagctatccttcgcggaaaacacaaaccaacttacacaccacacgttgatactggagatcatgtgatcatcatcaacgctgaaaaaatcgagttaactggtaaaaagttaactgacaaaatctactaccgtcacactcaacatccaggcggattaaaatcaagaactgctcttgaaatgcgtacaaactaccctgagaaaatgcttgagcttgctatcaaaggcatgcttccaaaaggttctctaggtcgtcaaatgttcaaaaaattgaacgtataccgtggttctgagcatccacacgaagcacaaaaacctgaagtttacgaacttcgcggttaattaaaaaggaggttaccaatttggcacaggttcaatattacggtactggccgtcgtaaaagctctgtagcgcgtgtgcgtttagttccaggagaaggccgtatcgtcgttaataatcgtgaaatcagcgaacatatcccatctgcagctttaatcgaagatatcaaacaaccattaactttgactgaaacagctggcacttatgatgttttagtaaacgtacatggaggcggcctatctggtcaagctggagcaatccgtcacggtatcgctcgtgctttgcttgaagcagatccagaataccgtacaactcttaaacgtgcaggtcttctgactcgtgacgctcgtatgaaagaacgtaaaaaatacggtcttaaaggcgctcgtcgtgcacctcagttctcaaaacgttaattttacgttttcaaaaagctctcgaccttgggttgggagcttttttctttcaataaaacgtggcagcctcgcataaaaataacaactgaatggacgtttggcggggttaagcaaattgtttgtttataaacggtctctttgtaataatcatgttagctttcattcttattcaattggaacttcggtcaatgtttattatcgttatgtgctcagcccagcttcatctaaccactgtatctcatccgttaaagttcactgctgattcttaacccggagaaacaatagctctcattgctaatggctttatgtaacgaagtaaaagtaaatctgatgatataaatcacatatctcctttgtgatttttttgcgtttttatgaacttttttctaaatatgcaaagggaaagcgatatcaatctagaaatatttgttatactctatacattaaagtaaggagaagattcatgaatgcgttagtagctcataatagcaaagcctgggataaaaaagtagaaacaggcaatgaatggactgttgctgttgagcagcaggttatcgaacaagcaaaaaaaggcaattgggatataagggtaacaccaatgaaagatgtaccgaaggattggtttccgcctatcaaaggtctgaaagtactctgtttagcatcaggcggcggccagcagggtccagttttggcagccgcaggcgcggatgtcaccgtattagataactcagaaaaacaactgaatcaggataaaatgattgctgagcgagatggtctcacgatacacactgtcaaaggaagcatggacgatttaagtgtatttaatgatgaatcatttgatgtcattgtacatcctgttgccaatgtttttgttgagaatgtcctcccggtatggaaggaagcgtaccgtgtgttgaaaaggaacggcattctaatctcgggttttgtcaatcctgttgtatttctgtttgatacagaattagaacagcaaggtgttttaaaagtaaaacactccattccatacgctgacccagaagatcttccgaaacataaagtgaaaaaactgatcgaaaataatgaggctctggaattcggtcattccttagaagaccaaatcaaaggccagattgatgccggttttatcgttactggtttttatgaagataaaggcgggtttgtattagaccaatatatccatacatattctgcaacaagaagcgtgaaagtatgaaaagcagcgacctgttagaggggctgcttttttcataaccaattacagaacgtttgttccgcaccctgcggaaagctgattttttatcgattttacaccttcatttgggcgaatttccaaccgaattcgggcattgtttcatcatccaaacctcaaaataatcggtaaaaggagagtgaatttatatggcagaagtactgtcttttatggatgtgaaacgccaaaaggattttgaattagaaaagaacttgctcaaagaactctctctgagacaaattatccagtctgttaaggattgtttggaaccattatttccatttttacatgatgaacgagatattattactgaaggctgtattgattttgcgattgaagcttatttgttaggcgggcgttttgggatattcggctattacggagaatccatgcagagtatcagtgcccgctctgcaagagaagaagaagagctacgtatggagttttttgattatctctataattggatacacgagcaatacgcaacatttgataaaaacacggtttatgaagcggcacgcaagttcattaaagattggtggacagcggggtttgttcaaagagaaaaacagtgtaagcttcgcatgcgataatcatatttcccggccctgtcccatagttatgtaataacggacaagcgggaggggaagggatgaggaaaaagcttaaatggctcagttttttgctaggcttcatcgtattactatttctgttcaaatatcagttcagcaataacgactcttggaagccgtggagcttgcccttgagcggtaaaatcatttatctagatccaggtcatggcgggcctgacggcggagcagtcggcggaaagctgttagagaaggatgttaccctggaagtggcctttagagtcagggattatcttcaagaacaaggagcgcttgttatcatgaccagagaaagtgatactgatctcgctccagaaggaacaaaaggctatagtcgacgaaaagctgaggatctaagacaacgagtcaaattaataaaccattcagaggcggagctctatatcagcattcatcttaatgcgattccgtcacaaaaatggagcggagcccaaagcttttattacgggaaatatgcggaaaatgagaaagtcgcaaaatacatccaggatgagctgagaagaaatctggaaaacacaacccggaaagcaaagcggattcatggtatctacttaatgcaaaacgtcaccaaaccgggggcgcttatagaagtcggatttttatccaatccaaacgaagcaacgctactcggtaaaccgaaatatcacgacaaggtggcatcttccatatataaaggcattttgcgatatttcacagaaaaaggagaccctccggagtaatggagggttttcttgtggttctaagcataagacacccgccatttatgtatgatataataataattgtaaacgaatacacaaaagggtgaggttcgatgataagagaagatgaagtaagaaaactagtcggagaaatgcgcgaaccttttcttcaaagacctctgggagaattggatgccgttaaggaaattaaaataaagcctgaaaaacggcatatcagtgtaaaagtcgctcttgcaaaaacaggaactgcagaacaaatgcagattcagcaagagatcgtaaacgtattaaaaggggcaggagctgagacagtcggccttcgatttgaagagctgcctgaagaaacggttgctaaattccgggcgccgtcagctgagaaaaaaacattattaaatatggataacccgccagtctttcttgctgtagcaagtggaaaaggcggcgtaggcaagtcaactgtgtcagtaaacctagctatttctctggctcgtctagggaaaaaggttggtttaattgatgcggatatttatgggttcagtgtgccggacatgatgggtatcactgtgcgtccaacaattgaaggagagaaacttcttcctgttgaacgctttggagtaaaggtcatgtcaatgggctttttcgtagaagaaaatgccccggtcgtatggagagggcccatgctcggcaaaatgctgaataattttttccatgaagtagagtggggagaagtagactatatcgttcttgatcttccgcctggtacaggggacgttgctctcgatgtacatacaatgcttccgagctgcaaagaaattatcgtatctacgccacatccgacagctgcttttgtcgcggccagagcgggctctatggcgattaaaaccgatcatgaggtcgtgggtgtcatagagaacatggcttattatgaaagtgcaaagacaggggaaagagaatatgtgtttggaaaaggcggaggagataaactggctgaggaactaaacgtgcctttgctcggcagaatcccattgaaacagcccgattgggataaggaccaatttgctccgtctgtttatgacgaaaatcatccaatcggagaaatatatcaggacatcgcaaaaaaaatagatgcaaaaatgtcagtgcaggtataaaaggtgaaccgggattccagatcccggctttccctttattcactttcttttgctgtgtcttttgctgcttttttcagctcatcttcgaactgctttttgtaaagcggactagaaagtgtttcgttaataacctcttctaaataactgcggaattcttggctttttgccagctggctgtactttttatccatgccgggatcctgcataacgctcatcagcatcttctggtaatctggatccttcatcagctttttaatcactttttcatgctctgtctgaagagttttggcaaagccctcagcaaaatcagtgtcttcaaagatgtttttccaaaattcttcaccttttttagatgtgagtgttttttctattgttcctttaattgcatcttggtcaatcaccagcgcttcattcatggcatcatcatttaataattccttaatagctttctttccatcatcagtttttaatatatcaacaaccatttttttggtctgatcatagtccatatccgttgcttggtcttttggagcgcaagctgttacagataataacaaaaaacagctcatcaatagcgttttggcttttgacatgcttaagctcctttcacatacttgtcttacctttaatatgattcatctgtttggaattatacataacaaaatatcgctgttcgcgatttttgaggggatgaataaagaaatgaaaagccgtggtttagttcgttttttcttttctattttagctgtcggggcgcttatcacgagtattgtgggttttgctttaaagtggggagaatatagagggctgtttctaacatttgaagcgggacagattttctctgttttattttggtttatcggtgtaggcatgattttcagtgtgatcagccaaatgggttttttcgtgtttttaacagttcatcggtttgcgcttgagatattaaggtcctcctctttgtggaatttgctgcagttgtttttcatcctgtttgttgcttttgatttaatgtacgtgcgttttttattttttggagagagcggagaatcgctggctggctatgcgtggttaccggtgtttttattgatctttggagtgattacagcttatataaagcaaaagcagtcctctaagaaaacatttgtgtcatcgttatttttgatggttgtgattaccgcattagaatggttccctgcattaagagtaaatgatgaggactggctttatttaatgctttttccgttaatggcatgtaatgccttccaattgctgatgctgccgaagtttgcagcaaagtaattactttacctctgcggatttggcatcagaatttgcgatgagatcacccacggttacattttttaatcctttttctttcagctgatggatgatatcaggcaatgcttcttctgtttgttttgcagaatcggaggcatgtaaaagaataatgtctccaccggaaacttgcttggtcacattgtcgatgattttttcaactccgggatttgtccagtcttgagagttcacactgtaatgaacgactgtataattgtattgctttgcgacctttagaacattcttattgaattggccggtagggggtcttaatagctgtatgtctttgacccctaacttttcaaaggctgtttgcgcacggttcatgtccttttttatttcgctgctctctaaattggcatagtttttataagcgtagcccatgctcccgatttgatggccgtcctttacgatacgggccactgtgtcgggatggcgttctgcccaagaagcggacaggaaaaacgttgcgtttttaatcccgtttgctttcagagtattaagtatcggttctgctctctcatcaccccagctgatatcgaaagtaagtgaaatatctttagagtctgtttctcctttataaatggctttaggtccggtgtcagttgaaaacacgggaagcgggacagctctttggatataaaaaaagctggcagctgcaaatgcggcgataagtataataattaattgttttacccgtttaatgtgccacacatagaagtgattcactgatgatgcctccttatcttgtccatcattcttgttttacatcttatgagcatggacaattgaatataaccgataaaatgtctcttcacatacagcctaaattgggtgttgaccttttgataatatccgtgatatattattattcgtcgctgataaacagctgacatcaactaaaagcttcattaaatactttgaaaaaagttgttgacttaaaagaagctaaatgttatagtaataaagctgcttcgttaagcggcagtaatgatctttgaaaactaaacaagacaaaacgtacctgttaattcatttttataaatcgcacagcgatgtgcgtagtcagtcaaactagggcctgtacgatgcaggtcacacaggtgtcgccgcaggatgcggtgaacttaacctgtgatccatttatcggagagtttgatcctggctcaggacgaacgctggcggcgtgcctaatacatgcaagtcgagcggacagatgggagcttgctccctgatgttagcggcggacgggtgagtaacacgtgggtaacctgcctgtaagactgggataactccgggaaaccggggctaataccggatggttgtttgaaccgcatggttcaaacataaaaggtggcttcggctaccacttacagatggacccgcggcgcattagctagttggtgaggtaatggctcaccaaggcaacgatgcgtagccgacctgagagggtgatcggccacactgggactgagacacggcccagactcctacgggaggcagcagtagggaatcttccgcaatggacgaaagtctgacggagcaacgccgcgtgagtgatgaaggttttcggatcgtaaagctctgttgttagggaagaacaagtaccgttcgaatagggcggtaccttgacggtacctaaccagaaagccacggctaactacgtgccagcagccgcggtaatacgtaggtggcaagcgttgtccggaattattgggcgtaaagggctcgcaggcggtttcttaagtctgatgtgaaagcccccggctcaaccggggagggtcattggaaactggggaacttgagtgcagaagaggagagtggaattccacgtgtagcggtgaaatgcgtagagatgtggaggaacaccagtggcgaaggcgactctctggtctgtaactgacgctgaggagcgaaagcgtggggagcgaacaggattagataccctggtagtccacgccgtaaacgatgagtgctaagtgttagggggtttccgccccttagtgctgcagctaacgcattaagcactccgcctggggagtacggtcgcaagactgaaactcaaaggaattgacgggggcccgcacaagcggtggagcatgtggtttaattcgaagcaacgcgaagaaccttaccaggtcttgacatcctctgacaatcctagagataggacgtccccttcgggggcagagtgacaggtggtgcatggttgtcgtcagctcgtgtcgtgagatgttgggttaagtcccgcaacgagcgcaacccttgatcttagttgccagcattcagttgggcactctaaggtgactgccggtgacaaaccggaggaaggtggggatgacgtcaaatcatcatgccccttatgacctgggctacacacgtgctacaatggacagaacaaagggcagcgaaaccgcgaggttaagccaatcccacaaatctgttctcagttcggatcgcagtctgcaactcgactgcgtgaagctggaatcgctagtaatcgcggatcagcatgccgcggtgaatacgttcccgggccttgtacacaccgcccgtcacaccacgagagtttgtaacacccgaagtcggtgaggtaaccttttaggagccagccgccgaaggtgggacagatgattggggtgaagtcgtaacaaggtagccgtatcggaaggtgcggctggatcacctcctttctaaggatattatacggaatataagaccttgggtcttataaacagaacgttccctgtcttgtttagttttgaaggatcattccttcgaaacgtgttctttgaaaactagataacagtagacatcacattcaattagtaatacaagatatcacatagtgattctttttaacggttaagttagaaagggcgcacggtggatgccttggcactaggagccgatgaaggacgggacgaacaccgatatgcttcggggagctgtaagcaagctttgatccggagatttccgaatggggaaacccaccactcgtaatggagtggtatccatatctgaattcataggatatgagaaggcagacccggggaactgaaacatctaagtacccggaggaagagaaagcaaatgcgattccctgagtagcggcgagcgaaacgggattagcccaaaccaagaggcttgcctcttggggttgtaggacactctgtacggagttacaaaagaacgaggtagatgaagaggtctggaaaggcccgccataggaggtaacagccctgtagtcaaaacttcgttctctcctgagtggatcctgagtacggcggaacacgtgaaattccgtcggaatccgggaggaccatctcccaaggctaaatactccctagtgaccgatagtgaaccagtaccgtgagggaaaggtgaaaagcaccccggaaggggagtgaaagagatcctgaaaccgtgtgcctacaagtagtcagagcccgttaacgggtgatggcgtgccttttgtagaatgaaccggcgagttacgatcccgtgcaaggttaagcagaagatgcggagccgcagcgaaagcgagtctgaatagggcgcatgagtacgtggtcgtagacccgaaaccaggtgatctacccatgtccagggtgaagttcaggtaacactgaatggaggcccgaacccacgcacgttgaaaagtgcggggatgaggtgtgggtaggggtgaaatgccaatcgaacctggagatagctggttctctccgaaatagctttagggctagcctcaaggtaagagtcttggaggtagagcactgattggactaggggcccctaccgggttaccgaattcagtcaaactccgaatgccaatgacttatccttgggagtcagactgcgagtgataagatccgtagtcgaaagggaaacagcccagaccgccagctaaggtcccaaagtatacgttaagtggaaaaggatgtggagttgcttagacaaccaggatgttggcttagaagcagccaccatttaaagagtgcgtaatagctcactggtcgagtgactctgcgccgaaaatgtaccggggctaaacgtatcaccgaagctgcggactgttcttcgaacagtggtaggagagcgttctaagggctgtgaagccagaccggaaggactggtggagcgcttagaagtgagaatgccggtatgagtagcgaaagaggggtgagaatcccctccaccgaatgcctaaggtttcctgaggaaggctcgtccgctcagggttagtcgggacctaagccgaggccgaaaggcgtaggcgatggacaacaggttgatattcctgtaccacctcctcaccatttgagcaatggggggacgcaggaggatagggtaagcgcggtattggatatccgcgtccaagcagttaggctgggaaataggcaaatccgtttcccataaggctgagctgtgatggcgagcgaaatatagtagcgaagttcctgattccacactgccaagaaaagcctctagcgaggtgagaggtgcccgtaccgcaaaccgacacaggtaggcgaggagagaatcctaaggtgatcgagagaactctcgttaaggaactcggcaaaatgaccccgtaacttcgggagaaggggtgctctgttagggtgcaagcccgagagagccgcagtgaataggcccaggcgactgtttagcaaaaacacaggtctctgcgaagccgtaaggcgaagtataggggctgacgcctgcccggtgctggaaggttaagaggagcgcttagcgtaagcgaaggtgcgaattgaagccccagtaaacggcggccgtaactataacggtcctaaggtagcgaaattccttgtcgggtaagttccgacccgcacgaaaggcgcaacgatctgggcactgtctcaacgagagactcggtgaaattatagtacctgtgaagatgcaggttacccgcgacaggacggaaagaccccgtggagctttactgcagcctgatattgaatgttggtacagcttgtacaggataggtaggagccttggaaaccggagcgccagcttcggtggaggcatcggtgggatactaccctggctgtattgaccttctaacccgccgcccttatcgggcggggagacagtgtcaggtgggcagtttgactggggcggtcgcctcctaaaaggtaacggaggcgcccaaaggttccctcagaatggttggaaatcattcgcagagtgtaaaggcacaagggagcttgactgcgagacctacaagtcgagcagggacgaaagtcgggcttagtgatccggtggttccgcatggaagggccatcgctcaacggataaaagctaccccggggataacaggcttatctcccccaagagtccacatcgacggggaggtttggcacctcgatgtcggctcatcgcatcctggggctgtagtcggtcccaagggttgggctgttcgcccattaaagcggtacgcgagctgggttcagaacgtcgtgagacagttcggtccctatccgtcgcgggcgcaggaaatttgagaggagctgtccttagtacgagaggaccgggatggacgcaccgctggtgtaccagttgttctgccaagggcatcgctgggtagctatgtgcggacgggataagtgctgaaagcatctaagcatgaagcccccctcaagatgagatttcccattccgcaaggaagtaagatccctgaaagatgatcaggttgataggtctgaggtggaagtgtggcgacacatggagctgacagatactaatcgatcgaggacttaaccatatttttgaatgatgtcacacctgttatctagttttgagagaacactctcaatttgtttggtggcgatagcgaagaggtcacacccgttcccataccgaacacggaagttaagctcttcagcgccgatggtagtcgggggtttccccctgtgagagtaggacgccgccaagcagatttattaattctaccatgtttgtttatgaagctttatattattccgcagtagctcagtggtagagctatcggctgttaaccgatcggtcgtaggttcgaatcctacctgcggagccattgcttccatagctcagcaggtagagcacttccatggtaaggaagaggtcagcggttcgagcccgcttggaagctttatttaatgtattattaccaaggtttctcataaggagaaagctttttttattgcgatatgcggaagtagttcagtggtagaacaccaccttgccaaggtgggggtcgcgggttcgaatcccgtcttccgctccatttatcccaacgggatattgtaaattgaattgcgcccgtagctcaattggatagagcgtttgactacggatcaaaaggttaggggttcgactcctctcgggcgcgccatatcttttaatagaatagatgggaaatcgggaagtagctcagcttggtagagcacatggtttgggaccatggggtcgcaggttcgaatcctgtcttcccgaccattttttatggggccttagctcagctgggagagcgcctgctttgcacgcaggaggtcagcggttcgatcccgctaggctccaccaaaagtttttaaaaagttgttgactttgaagaagtgacgttgtatactaataaagttactttaacaaagcaaataaacaaaatgatctttgaaaactaaacaagacaaaacgtacctgttaattcagtttttaaaaaatcgcacagcgatgtgcgtagtcagtcaaactactttatcggagagtttgatcctggctcaggacgaacgctggcggcgtgcctaatacatgcaagtcgagcggacagatgggagcttgctccctgatgttagcggcggacgggtgagtaacacgtgggtaacctgcctgtaagactgggataactccgggaaaccggggctaataccggatggttgtttgaaccgcatggttcaaacataaaaggtggcttcggctaccacttacagatggacccgcggcgcattagctagttggtgaggtaacggctcaccaaggcgacgatgcgtagccgacctgagagggtgatcggccacactgggactgagacacggcccagactcctacgggaggcagcagtagggaatcttccgcaatggacgaaagtctgacggagcaacgccgcgtgagtgatgaaggttttcggatcgtaaagctctgttgttagggaagaacaagtaccgttcgaatagggcggtaccttgacggtacctaaccagaaagccacggctaactacgtgccagcagccgcggtaatacgtaggtggcaagcgttgtccggaattattgggcgtaaagggctcgcaggcggtttcttaagtctgatgtgaaagcccccggctcaaccggggagggtcattggaaactggggaacttgagtgcagaagaggagagtggaattccacgtgtagcggtgaaatgcgtagagatgtggaggaacaccagtggcgaaggcgactctctggtctgtaactgacgctgaggagcgaaagcgtggggagcgaacaggattagataccctggtagtccacgccgtaaacgatgagtgctaagtgttagggggtttccgccccttagtgctgcagctaacgcattaagcactccgcctggggagtacggtcgcaagactgaaactcaaaggaattgacgggggcccgcacaagcggtggagcatgtggtttaattcgaagcaacgcgaagaaccttaccaggtcttgacatcctctgacaatcctagagataggacgtccccttcgggggcagagtgacaggtggtgcatggttgtcgtcagctcgtgtcgtgagatgttgggttaagtcccgcaacgagcgcaacccttgatcttagttgccagcattcagttgggcactctaaggtgactgccggtgacaaaccggaggaaggtggggatgacgtcaaatcatcatgccccttatgacctgggctacacacgtgctacaatggacagaacaaagggcagcgaaaccgcgaggttaagccaatcccacaaatctgttctcagttcggatcgcagtctgcaactcgactgcgtgaagctggaatcgctagtaatcgcggatcagcatgccgcggtgaatacgttcccgggccttgtacacaccgcccgtcacaccacgagagtttgtaacacccgaagtcggtgaggtaaccttttaggagccagccgccgaaggtgggacagatgattggggtgaagtcgtaacaaggtagccgtatcggaaggtgcggctggatcacctcctttctaaggatattatacggaatataagaccttgggtcttataaacagaacgttccctgtcttgtttagttttgaaggatcattccttcgaaacgtgttctttgaaaactagataacagtagacatcacattcaattagtaatacaagatatcacatagtgattctttttaacggttaagttagaaagggcgcacggtggatgccttggcactaggagccgatgaaggacgggacgaacaccgatatgcttcggggagctgtaagcaagctttgatccggagatttccgaatggggaaacccaccactcgtaatggagtggtatccatatctgaattcataggatatgagaaggcagacccggggaactgaaacatctaagtacccggaggaagagaaagcaaatgcgattccctgagtagcggcgagcgaaacgggattagcccaaaccaagaggcttgcctcttggggttgtaggacactctgtacggagttacaaaagaacgaggtagatgaagaggtctggaaaggcccgccataggaggtaacagccctgtagtcaaaacttcgttctctcctgagtggatcctgagtacggcggaacacgtgaaattccgtcggaatccgggaggaccatctcccaaggctaaatactccctagtgaccgatagtgaaccagtaccgtgagggaaaggtgaaaagcaccccggaaggggagtgaaagagatcctgaaaccgtgtgcctacaagtagtcagagcccgttaacgggtgatggcgtgccttttgtagaatgaaccggcgagttacgatcccgtgcaaggttaagcagaagatgcggagccgcagcgaaagcgagtctgaatagggcgcatgagtacgtggtcgtagacccgaaaccaggtgatctacccatgtccagggtgaagttcaggtaacactgaatggaggcccgaacccacgcacgttgaaaagtgcggggatgaggtgtgggtaggggtgaaatgccaatcgaacctggagatagctggttctctccgaaatagctttagggctagcctcaaggtaagagtcttggaggtagagcactgattggactaggggcccctaccgggttaccgaattcagtcaaactccgaatgccaatgacttatccttgggagtcagactgcgagtgataagatccgtagtcgaaagggaaacagcccagaccgccagctaaggtcccaaagtatacgttaagtggaaaaggatgtggagttgcttagacaaccaggatgttggcttagaagcagccaccatttaaagagtgcgtaatagctcactggtcgagtgactctgcgccgaaaatgtaccggggctaaacgtatcaccgaagctgcggactgttcttcgaacagtggtaggagagcgttctaagggctgtgaagccagaccggaaggactggtggagcgcttagaagtgagaatgccggtatgagtagcgaaagaggggtgagaatcccctccaccgaatgcctaaggtttcctgaggaaggctcgtccgctcagggttagtcgggacctaagccgaggccgaaaggcgtaggcgatggacaacaggttgatattcctgtaccacctcctcaccatttgagcaatggggggacgcaggaggatagggtaagcgcggtattggatatccgcgtccaagcagttaggctgggaaataggcaaatccgtttcccataaggctgagctgtgatggcgagcgaaatatagtagcgaagttcctgattccacactgccaagaaaagcctctagcgaggtgagaggtgcccgtaccgcaaaccgacacaggtaggcgaggagagaatcctaaggtgatcgagagaactctcgttaaggaactcggcaaaatgaccccgtaacttcgggagaaggggtgctctgttagggtgcaagcccgagagagccgcagtgaataggcccaggcgactgtttagcaaaaacacaggtctctgcgaagccgtaaggcgaagtataggggctgacgcctgcccggtgctggaaggttaagaggagcgcttagcgtaagcgaaggtgcgaattgaagccccagtaaacggcggccgtaactataacggtcctaaggtagcgaaattccttgtcgggtaagttccgacccgcacgaaaggcgcaacgatctgggcactgtctcaacgagagactcggtgaaattatagtacctgtgaagatgcaggttacccgcgacaggacggaaagaccccgtggagctttactgcagcctgatattgaatgttggtacagcttgtacaggataggtaggagccttggaaaccggagcgccagcttcggtggaggcatcggtgggatactaccctggctgtattgaccttctaacccgccgcccttatcgggcggggagacagtgtcaggtgggcagtttgactggggcggtcgcctcctaaaaggtaacggaggcgcccaaaggttccctcagaatggttggaaatcattcgcagagtgtaaaggcacaagggagcttgactgcgagacctacaagtcgagcagggacgaaagtcgggcttagtgatccggtggttccgcatggaagggccatcgctcaacggataaaagctaccccggggataacaggcttatctcccccaagagtccacatcgacggggaggtttggcacctcgatgtcggctcatcgcatcctggggctgtagtcggtcccaagggttgggctgttcgcccattaaagcggtacgcgagctgggttcagaacgtcgtgagacagttcggtccctatccgtcgcgggcgcaggaaatttgagaggagctgtccttagtacgagaggaccgggatggacgcaccgctggtgtaccagttgttctgccaagggcatcgctgggtagctatgtgcggacgggataagtgctgaaagcatctaagcatgaagcccccctcaagatgagatttcccattccgcaaggaagtaagatccctgaaagatgatcaggttgataggtctgaggtggaagtgtggcgacacatggagctgacagatactaatcgatcgaggacttaaccatatttttgaatgatgtcacacctgttatctagttttgagagaacactctcaatttgtttggtggcgatagcgaagaggtcacacccgttcccataccgaacacggaagttaagctcttcagcgccgatggtagtcgggggtttccccctgtgagagtaggacgccgccaagcaattgcacgttagtgtaattttttaaaaaaagttgttgactttgaagaagtgacgttgtatactaataaagttgctttaacaaagcggacaaacaaaatgatctttgaaaactaaacaagacaaaacgtacctgttaattcagtttttaaaaatcgcacagcgatgtgcgtagtcagtcaaactactttatcggagagtttgatcctggctcaggacgaacgctggcggcgtgcctaatacatgcaagtcgagcggacagatgggagcttgctccctgatgttagcggcggacgggtgagtaacacgtgggtaacctgcctgtaagactgggataactccgggaaaccggggctaataccggatggttgtttgaaccgcatggttcaaacataaaaggtggcttcggctaccacttacagatggacccgcggcgcattagctagttggtgaggtaacggctcaccaaggcgacgatgcgtagccgacctgagagggtgatcggccacactgggactgagacacggcccagactcctacgggaggcagcagtagggaatcttccgcaatggacgaaagtctgacggagcaacgccgcgtgagtgatgaaggttttcggatcgtaaagctctgttgttagggaagaacaagtaccgttcgaatagggcggtaccttgacggtacctaaccagaaagccacggctaactacgtgccagcagccgcggtaatacgtaggtggcaagcgttgtccggaattattgggcgtaaagggctcgcaggcggtttcttaagtctgatgtgaaagcccccggctcaaccggggagggtcattggaaactggggaacttgagtgcagaagaggagagtggaattccacgtgtagcggtgaaatgcgtagagatgtggaggaacaccagtggcgaaggcgactctctggtctgtaactgacgctgaggagcgaaagcgtggggagcgaacaggattagataccctggtagtccacgccgtaaacgatgagtgctaagtgttagggggtttccgccccttagtgctgcagctaacgcattaagcactccgcctggggagtacggtcgcaagactgaaactcaaaggaattgacgggggcccgcacaagcggtggagcatgtggtttaattcgaagcaacgcgaagaaccttaccaggtcttgacatcctctgacaatcctagagataggacgtccccttcgggggcagagtgacaggtggtgcatggttgtcgtcagctcgtgtcgtgagatgttgggttaagtcccgcaacgagcgcaacccttgatcttagttgccagcattcagttgggcactctaaggtgactgccggtgacaaaccggaggaaggtggggatgacgtcaaatcatcatgccccttatgacctgggctacacacgtgctacaatggacagaacaaagggcagcgaaaccgcgaggttaagccaatcccacaaatctgttctcagttcggatcgcagtctgcaactcgactgcgtgaagctggaatcgctagtaatcgcggatcagcatgccgcggtgaatacgttcccgggccttgtacacaccgcccgtcacaccacgagagtttgtaacacccgaagtcggtgaggtaaccttttaggagccagccgccgaaggtgggacagatgattggggtgaagtcgtaacaaggtagccgtatcggaaggtgcggctggatcacctcctttctaaggatattatacggaatataagaccttgggtcttataaacagaacgttccctgtcttgtttagttttgaaggatcattccttcgaaacgtgttctttgaaaactagataacagtagacatcacattcaattagtaacacaagatatcacatagtgattctttttaacggttaagttagaaagggcgcacggtggatgccttggcactaggagccgatgaaggacgggacgaacaccgatatgcttcggggagctgtaagcaagctttgatccggagatttccgaatggggaaacccaccactcgtaatggagtggtatccatatctgaattcataggatatgagaaggcagacccggggaactgaaacatctaagtacccggaggaagagaaagcaaatgcgattccctgagtagcggcgagcgaaacgggattagcccaaaccaagaggcttgcctcttggggttgtaggacactctgtacggagttacaaaagaacgaggtagatgaagaggtctggaaaggcccgccataggaggtaacagccctgtagtcaaaacttcgttctctcctgagtggatcctgagtacggcggaacacgtgaaattccgtcggaatccgggaggaccatctcccaaggctaaatactccctagtgaccgatagtgaaccagtaccgtgagggaaaggtgaaaagcaccccggaaggggagtgaaagagatcctgaaaccgtgtgcctacaagtagtcagagcccgttaacgggtgatggcgtgccttttgtagaatgaaccggcgagttacgatcccgtgcaaggttaagcagaagatgcggagccgcagcgaaagcgagtctgaatagggcgcatgagtacgtggtcgtagacccgaaaccaggtgatctacccatgtccagggtgaagttcaggtaacactgaatggaggcccgaacccacgcacgttgaaaagtgcggggatgaggtgtgggtaggggtgaaatgccaatcgaacctggagatagctggttctctccgaaatagctttagggctagcctcaaggtaagagtcttggaggtagagcactgattggactaggggcccctaccgggttaccgaattcagtcaaactccgaatgccaatgacttatccttgggagtcagactgcgagtgataagatccgtagtcgaaagggaaacagcccagaccgccagctaaggtcccaaagtatacgttaagtggaaaaggatgtggagttgcttagacaaccaggatgttggcttagaagcagccaccatttaaagagtgcgtaatagctcactggtcgagtgactctgcgccgaaaatgtaccggggctaaacgtatcaccgaagctgcggactgttcttcgaacagtggtaggagagcgttctaagggctgtgaagccagaccggaaggactggtggagcgcttagaagtgagaatgccggtatgagtagcgaaagaggggtgagaatcccctccaccgaatgcctaaggtttcctgaggaaggctcgtccgctcagggttagtcgggacctaagccgaggccgaaaggcgtaggcgatggacaacaggttgatattcctgtaccacctcctcaccatttgagcaatggggggacgcaggaggatagggtaagcgcggtattggatatccgcgtccaagcagttaggctgggaaataggcaaatccgtttcccataaggctgagctgtgatggcgagcgaaatatagtagcgaagttcctgattccacactgccaagaaaagcctctagcgaggtgagaggtgcccgtaccgcaaaccgacacaggtaggcgaggagagaatcctaaggtgatcgagagaactctcgttaaggaactcggcaaaatgaccccgtaacttcgggagaaggggtgctctgttagggtgcaagcccgagagagccgcagtgaataggcccaggcgactgtttagcaaaaacacaggtctctgcgaagccgtaaggcgaagtataggggctgacgcctgcccggtgctggaaggttaagaggagcgcttagcgtaagcgaaggtgcgaattgaagccccagtaaacggcggccgtaactataacggtcctaaggtagcgaaattccttgtcgggtaagttccgacccgcacgaaaggcgcaacgatctgggcactgtctcaacgagagactcggtgaaattatagtacctgtgaagatgcaggttacccgcgacaggacggaaagaccccgtggagctttactgcagcctgatattgaatgttggtacagcttgtacaggataggtaggagccttggaaaccggagcgccagcttcggtggaggcatcggtgggatactaccctggctgtattgaccttctaacccgccgcccttatcgggcggggagacagtgtcaggtgggcagtttgactggggcggtcgcctcctaaaaggtaacggaggcgcccaaaggttccctcagaatggttggaaatcattcgcagagtgtaaaggcacaagggagcttgactgcgagacctacaagtcgagcagggacgaaagtcgggcttagtgatccggtggttccgcatggaagggccatcgctcaacggataaaagctaccccggggataacaggcttatctcccccaagagtccacatcgacggggaggtttggcacctcgatgtcggctcatcgcatcctggggctgtagtcggtcccaagggttgggctgttcgcccattaaagcggtacgcgagctgggttcagaacgtcgtgagacagttcggtccctatccgtcgcgggcgcaggaaatttgagaggagctgtccttagtacgagaggaccgggatggacgcaccgctggtgtaccagttgttctgccaagggcatcgctgggtagctatgtgcggacgggataagtgctgaaagcatctaagcatgaagcccccctcaagatgagatttcccattccgcaaggaagtaagatccctgaaagatgatcaggttgataggtctgaggtggaagtgtggcgacacatggagctgacagatactaatcgatcgaggacttaaccatatttttgaatgatgtcacacctgttatctagttttgagagaacactctcaatttgtttggtggcgatagcgaagaggtcacacccgttcccataccgaacacggaagttaagctcttcagcgccgatggtagtcgggggtttccccctgtgagagtaggacgccgccaagcaagcttaaacccagctcattgagctgggttttttattttatatctgtgccgatttgcttttatcagtatccattttatcaagcttctgctttttaagttttctaatacttttgaatccaatacaatcaccagcatgatcaacatgagagtcataaataatcaaaatgcagtttgtacgggagactcatccagactccatccgtctgcaattggcagaatagagccgccaatccattggcagcgagcagcatgcctgtcgtttgttctgtttttccatgatgaaattgattggtgacaattaagataatggcgaacatgctggccataaataagtcctaagaaaaaactaagaataatccctgcaaaagctgttttattgattgccaaaatacagagttaaatgaggccgctcatatttatcagcctgagataatgatgataggttattttttcggaaaccggctcgggttgccaaatgagagaaaagatattactgtcattaaaacgattcttggtttcatccggatatgataaaatgtctcagactatatttgagccatttttttcttcagcaatcatcttgcgtaattgataaaaatttattatgatactctttgtatgacaactccttgcctcaatacaatatactcaacgtttccccgttttctccggtcgtttttcttttcattttctcccgtaaaataaaaaaagctcccaatacaatagatatggtgcggatttattttttactaaaaaggagtcgttatatttgaataatagttttacattaaaacagcaatggttcgggaatatccgaaaagacattcttgctggcattttagttgcgttagcgttaatacctgaagcgattggcttttctattatagccggtgtggatccgatggtcggtctttatgcgtcattttgcatagccattattatttctatttttggcggcagacctggcatgatttcagctgcgacaggctcaatggcagttgttatggtgtcgctggttgctgatcatgggcttcagtatttatttgcagctacgattttgactggcattattcaagtgattttaggtatcagtaaaattgcaagattaatgaaattcatcccgcgttctgtgatgatcgggtttgtgaatgcgctggcaatccttatcttctctgcgcagcttccccagtttgaaggtgcttcttggagcatgtatgcgatgcttgccgggtcgttggttattatttatgtgctgccaaggtttacgactgctgttccgtctccgcttgtggcgattattgtgatgacaattattgcggtcactttccatgtggatgtgcggacggttggtgatatgggcaatatttctagttcattgcctcatttcttaatccctgatgttccgtttacctttgaaacactgcaaattatttttccttattcaattgctttagcgtttgtcgggttgcttgaatctttgctgacagcacagattattgatgaaatgacggatacggatagtgataaaaataaagagagccgcggacagggaattgcgaatatcgtgactggattctttggcggaatggcaggctgcgctatgatcggacaatctgtcattaatacaaaagcgggcggtcgcggacgtttgtcagcatttgttgccggtgcttttctgatgtttttaattgcggtgttaagtcatgtcgtggtgaaaatcccaatggcggcgttagtggctgtaatggttatggtgtctgtcggcacttttgattggtcttctttaaaaggtctcaaaaaagcgccgctcacggactcgattgtcacggttgtgactgtggttacggttgttgtgacagatgacttatctaagggtgtatttgtcggtgttcttttaagtgccgtgttctttgtagcaaaaatctcgaagctgaaaatcgtttctcatgcagaggatcaaaagcttagaacgtatcaagtgaaggggcaaatcttttttgcgtcagtgactgatcttacgaatgcgtttatatatcaagaggatattgagcgggttgtgattgacttaactgaagctcacgtatgggacgattctggtgcggccgcacttgataagattgttgcgaagtttaaggaacaaggcattgaagctgagttaaaaggtttgaataaagcgagtaaatctctaatgaaacagatggcataaaatagagaagcccagatgaatgagatctgggcttttttatataacatacacttaagcagcattgatataatagagagaagagaaattttaaataggggacttgcatatgatgcttcagaagctgaaccgtgtattggggagagtgatgccgctgttaacgccgactagtgtggtgttgggcgtgctgctgtctcagtttttaaatgggtatgaatgggctgtaccttggatctttgcttttattacgtttgcaggcagtttgagcgcgaactttcaatctttgagacatgcattgtctcatcctctccctatgattcttgcactattcgttcttcatattttcatgccgctttttgcttggggcagcggccatcttatatttaaaggtgatcctttgacgattaccggtttaacattggctgttgtgattcctacggggattacaagcttgatttgggcagcgatgtacaaagggaatgtcggtttgacactttcgattattttaattgatactgtgctgtcaccgctaatcgtaccgctgagtctttcattgctggccggcgctcaggttcatatggatgtgtggggaatgatgaaaggtctgattgtaatggtcgtgattccttcttttctgggcatgctgtttaatcagatgtcatctccagaaagaactgcgtctgtgagcagtgcgctgtcgcctttttcaaagctttgcttgatggcagtgattgcgattaacagttcagcgattgctccttatttcaaatccattgatttgagatttgcaggaatagctgtaacggtattctttatcgcgttaacaggctatgccgctgcttggctgatcggaaaaatgatgaaaaggcggcaagaggaaatagtctctcttatatttacgggaggcatgaggaatattagtgccggcgcagttcttgccgttacgttcttcccgtctcaggttgccgttcctgttgtgatcggcatgctgtttcagcagatattggctgctttgtttggctatatgctgaatcgttttgaattaaaaccaatgttgcagaaagcataaaaaaaccgctcatagggttgagcggttttttccgtatagccattcgagcgcgttgatgaactgtttgcagaaatacttgcggtggtgcaccgctcctttttcaattgaaagatacaaccggtcttcagtgaagcctttttcttttagactttgatgaacttgctttgtttttttcagcatatgtcgctgaatggattgtttttcacggccttcttcactcccgacagacatgaaaacacgtgtagtgccgggctttaaagaagatatatgaatggtttccgctgcgttctcgtaccagtatgaacctgatatagagcctattttcccgaacattgacggatattttaataaggcgaacattgagatgaggccgcctaatgaggcaccgatcattcctcttgactgcggttccctgatgacgttccagttttcttcgattagcggaatgaactggttcgttatatcagacagatagtgatatcccattccgccgaagtccgtgaaccgatcactgagtgatgcagccggccaaggtgtgtattcatttagccggttttcgggttcgataccgatcagcacgagttcagggagcctttgctgttgatatgcgctttctaataattcgatttggttttggaacaaagaactgccatcctgcacgtaaacagcaggaaatcccccgctgtctgtgctgtaggaaggagggaggtacagcgtgaacctcctgttgccggctttgtgttctgaaagagatcctttcaagcattctccccctttttttgcttgaaaagcagatataagaaataaggaactccgaggatcgccaaaatgatgcctgcgggcacttctgcgggctgaaaaaacagttttccggcaaagtctgcgcttatcacaagaagcatcccgattaaaccgctcagtggcaggatatagcgatgttcgacgccagccagtctccgtgagatatggggagcaattaagccgacaaacgccatacttcccgctacggagacacaggcgctgatgattgctacacaggctacgagcaggatggttttttctttatttgatgaaatgccgaggcttctgactgtgtcttcatcaaaacgaatggtgtcgagcaggcgggatttgccgataagaatcggtataaacagcagcatccatgggagaacggctgtgatatacgtccagttggcagaccagatgcttccgtttttccacaccatggccatttgatagtcttgcgggtccatttttaaagataaaaacaaagacagggcgctgaatcctgaattgatcgcaatccctaccagaataattcttcctgaatctaaattgcctctgtgccatgcaaatatgtaaatcaggatcgccgcgatgagcccgcctatcaatccaaagagcggcattcccatcgctgcagctatggatgtcacttccttctggccttggaataagagcataaacgctacaatgccggctcctgcccctgcgttgattccgagaattccaggatcagcaagcccgtttctcgtgatggcctggataacagcgcctgcaatgccaagaccgagtccaataatagcagccatgacaacccgcggcagccttaaatcgaacagcaaaatttcatactgcggattcgggtagatttgaaaaagagtggagagcagctcagcaggacgaacagaaaatgatccgctcgttaagctgaaataactgacaacaagaatcaaagcgatgaacaatgcatattttttagccattttgctcccctccttttcgtttaattaaataaaggaagaaaggtacgccgataatggatgttacgacctcaatcggtgtttcaaacggatagttgataaatctgcttgcgagatcacacagggttaaaaagattccgcccaaaatacaggagcacggaatcagcctgctgtaatcagagccgacgagaaatctcgtgatatgcggaacaaccaatccgacaaacgcaatttttccggccagcgctacggcactgccggttaaaatgatgacggaaagcatcgccatgattttaatggtttttttcttttgccccaggcttttagaaatgtcgtcccctaatgatacagcggttacctttttgctgagagaaatggccattataatgccaatcaggaaaaacggagcggcgagcttcaggaaatccggactcatttgatgaagtctggcactgtaccagaaactgagatcctgagaaatttgaaaataaatcgacatggccgctgataagctgctgagcagcatgcttgtgactgtgccgatgatggcgagctgcacgggggtaaatccgtttggcatcatggcggcaaggccgaatactaacacagctcctaacgctgagccgataaaagagtatatcatcatttcaatcgaagatgattgcgggagcagaaccatgcaaagcgtaatgataaacgctgaaccatctgaaacacccataatggatggcgaagctaaataattgcgcgtaatgccctgcataagcgctccagaaacagcaagggctgcccctatgagcagagcgccggcagcccttggaatccgggaatgccatataatttgatggtctgtgtttcccggatcgaaatgaataagagatgtaaaaacaatatctgtgctaagatgctttgccccataaaggattgaaagtaaaagtgacagcgctatagcaaatggagaagtaatcaatatgatacgtgtccactgttttgaatacatacaaaaacctactctgaattagttttgtgtcaatttttcagcagccgctttcaggaaacggactttgctccaagctgtgccgccttgtgcgagagggtccactgagttgacatacacatggtcttctttgactgctttaaggcttttccagattggatttttctctaaatcttttaaggcatcaggtttatctgcattttcatcatcagaaaattggacgaaaatatggtccgggttcatttcacttaatttttctaatgaaatcagctcttgcgcttttgcagcttttacttcgttaggcgccttaaggcctaaatcaccgtatagtgtggagttgaaatacacctgttcagggtaaatgtaaatgttgccttgtctaattctaatgacaagcgcttttgaatctttcgctttatcgttgatttttgtttttgtttcttttagatcttgttcatagtctgcaataattttctttgcttttttctcttttccggtcagctgggcaagcagcatcatgttttccttccagtttgaagagatatgagaaactgggatcgtcgtgcctgctgtgctgattttttgcagcgttttttccggaaactttgttgaagcaaggataacatctggcttcatttcaagaatcttttcaatatttggctccattttttctccggttggttcggctttatcagtgatgtctttgaacatatcagggaatttgccggagaatgaaattgcgccttgcggatgaacgtcaagcaatttcgcgtcttccattgattcaacgcttcccgtaatggcgattttgtctgtcggtacagttacttcatatgttttatcaagatattcaattttcttcttctcagatgctgtgccgcttgccttgctggcagttgattcatttttgctgccgcaagctgccgccgtcagcgcgagaagcaagattaataaggtaagagatatctttttcatctatagagcctcctgttcaattgataactattatcaattggaattatagagaatgaacagatataacaccatggacaaattcctgatttatcatggacaatctccggatagtaaagaaacagtttgctgaacgatgcgttcgtgcccgcaagctgagtattcattccacgggtcaagggatagaagataaacacggttatctcgtaccgcgcttaggttttgccatgcttctgtctgctgtaattgctggtagtaagctatggtctccggctctttaaaaagaaaaagcatcatacagtcagcttggtaatttgcgatattttctaacgaaatcgcttgttctgaaggtgtgtcagccgttgttgccgagctgaatcctaaatccccaaagaaaacttcgcggacacttcggttatgtgccagatagaagttttgcttatgcagcctcaaaaagagaaaacgcagcccttgaacgtgctgaagtgtttttttggcggctgttgtctgctggtcataatccgctagccacttttctgcttcggactcctcctttaaaaatgaggcagtttgcagaaagtgggttctccagctttcttctgaaggaaggtacatgacttctgcgatgcgattcaggcgatcttgttcttctggagaaatagaatccatgctgacaatcacatctggttctgcctgcgataacgtgtacaggttttcttcccacttttcattaaaccggtatgcactgagctggacgggtatatctgtcgaataatgctgatagtagtaagacgtccatttcggatgcagagcggccgcaaaaggtatgtggtgaagagggatgagatggcccattgtgccccttccgtatgcggcgattttctttcggcgttttttcatatagcttgtaggtgaacagcctgtatattttttaaagattctgctgaaataaaattcatcttgataaccggtttggtgtgcgatttctttcaatttgcagtttgattttgccatgagccgttttgcctttgtgattcgtgttttcgtaataaattctgttacgctctgtcctgtccattttttaaagctttcactgtagtgtttggcactgattcctgccatttgcgacagctgggcaagcgtgatttttgtatcggcatgtgtttcgatatagtgttttgttttttcgattgctgaatgtgtatccgtttgatcagataaactggcagtaaaaagatcataaatcaggctttgtacttcaatcacacattttagctgagaaagctgagacgattcattccatagtgcggcaagctcttgaagccggactgcaagattttcgatatgtgaaacattcataagcttcagtttggctaattccgattctgtgcacggtgtgtaaatatcttggccggcttccttgatatagctttgaagcctgatcagacaggcatctatatgtccatcggctgctggcataaagccaaaggtctcgttaggcggacaaacataaagtgtctttttttgcagaggattggtgtttgttccgatcgaaatatagccgtttccttttaaatgaaaaatcagcacgaatgaatcggctaattgctgttctgagaagagatcacttgtcttttttagatattcaatttgtatcggttgataaatcactgcattttgcacgagtagaccaccttttcagaagctttcaattgataatcattttcaataaaaattgtaccaaataaatgaaagttttcctatataaagcgggtgggtttttagcatgaaaaaaacccttacttatgtgtaaaagtaagggtctttcgttcagtaagaatatgttacacgtgtaacatacgatgcttacgttctaataaatgagatatttttttcttgttttgctgaattgttggagtgttttttcatagctgtttatgatgccctcaaccgaagttccattttcaatttttgtcctgatccagccgttgcctgccagtttatcgaatgaacctgttgacaggaactcaaaatcctcaggatagagatcgtgtatggttttaatgactgaaagacccgttttaacggcttcaaacttatctctgtctgtcacatagagctgcacaccgtggcaaagcgttccttgatgtttagaaaacgtcggtgtgaaggatgctgccctaaatgttacgcccggcaaatggaggctgtttaatgtttcttcaagttctgtgcttttgataaagggagctccgatcaattcgaatggctttgttgtccctcgcccttcggatatatttgttccttcaatcagcccggttgcaggataaacaaatgtgctttccaccgtcggcatgttaggcgaagggaggacgaaaggcaatcgggtatcgtcaaaatccatttttcgtttccagtgtttcatttttaccactgtaagatcggcatcaatatcaaattctttgttgaacagtaaagccaattcgcctatcgtcatcccatgcttcaatggaatgggatacaatccgacaaatgaggcgtattcaggttctaagattggcccttcaatatgattcccgccttggggattcggacggtctagcaccataaatggaatgccgttttctttagcggcttccattgcgtatgccattgtataaatgtacgtgtagaaacgggtcccgacatcctgaatgtcaaacattagaatatcgacatttttcagcatttctggagtcggttttttcgtttttccgtagaggctgtatacgggaaccccggttttttcgtcaatgtaagagcctacttcgtctccagcctgggcgtcaccgcggacgccgtgttcagggccgaataaagctgtcagtttgatatctgggttctcgtaaagaatatcgacactgcttttcagagatgcgtttactccggttggattggtgatcagtccgatgcgttttcccttgagctgttttttatagtctggcaagagcgtgtctatcccagtctggactttaggttttttagccgtttgattctttgaatcgggtgaagcagaggcagcggttatcgttccgaacatcatgagccctgtcagaaaagcgaatattgtttttctcatgtgtccctccttattaaagcggtcttcccgttttgatatttaatccgtagccatatggataaagggtgtcccccgggttcgtgactgatgggatgttaactggaagtgtgcctttaggttttgcctggccgaaaatcgccatcactccggccggaatattaggttgaagataacggccatttgcgtatcctttaaagccatagactgcaatcagtgcctttgcttcttcgaaattggcggcatcatatgggttgcgcaggctcattaagacaaatggtttgttgtgctgcagtgcggctttcatgacagctctcggaaacacggtggcccatttgcttgaatctgatattgtgtcgtcgatgacaccgtcgttgacgacagggtcatttttgacgacataggagccggttatgatataatcagccttttttacttgttttgcatgctcggcattaaatacttggttggcaaaattcattttgtcgacagatacgggtttgattttctttcgcttgatgagatcgtgaatggtttgttcgattgaagcagtttgttcttcgtaaggtgccacaattaagattcggctgccttttttaggcttgaacggcaaagtgtgctgttcattttttaatacagttactgctttttcagctatttttttctctgttttcaggtgctgctggcttcctacgatttttttggctttggctattttttcttttgtactgtcgctgtttcgtgctggatacatgccgcgttttattttcagggaaatgattctttcaactgatttgttgatttgttgttcaggaatatccccgtttttcacggcttctttcaaagcttgaatgacacgtgcgaatttctgttcttctttcattgaagtgactgaggctggcattaatgcaatatcgacaccagcttttacggccatgaccacagcctcctcctgtccgaaatgatctgcaattgccttcatattgagcgcatcggtaacgatgaccccattaaagcccatttcctgacgaagaagacctgtcatcactttttgcgaaagtgtagctggaaccagaatgtccgatccatcgagtttgcttttgtatgtggtgtcgtcgaaggcagggaattgaacatgggctgtcatcaccatatcagcaccagcatcaattgctttttgaaaaggataaagctcgacctcacgaagccgttcttggccatgggaaacgagcggcagtccataatggctgtcaacgtccgtgtctccatgtcccgggaaatgtttgagggcagacgcgatatcctgccgctgcaaccctttcatcgtatatagaccgaggcgtgatgtcagttctcgattggagctgaatgaccgtacgccgattacaggattatcaggattattgttaatgtccacgacagggctgaaatctgtattgatgcctaaggcagagagctctttcccgatgatgctgccggtctgatacgcattgattctgcttctggctgcgcccagcgccatattccctgggaaattagtgccctcccctaacctcgttacaatgccgccttcctgatcaatactcagcatgagcgggatttttggacttgccttttggtaatcgtctgtcagttggacagtttgttttgttgtttttacattttctgcaaaaaggatgatgcctccgaattgatatttcttgacgaggctggcgacttcatcattcatttctgtaagggcttgcggagaggactcgccttccttttgccaatttctaaaatcaggcatcagcatctggccgagtttttcatctaacgacatacgattgacaatctgattggcatcgattgaacgtttggatgcagaggcttctgtctgtctggccccgaaaaagcatgaaagaaagagaacggctgaaaggataagcggaaagacaggtctcatagaaacttcctcctatcgtctaatcattcactccatcgcttcataaatcgcggttatgacacttccataactgcctgttgcaaattgatcaccctcaaagacgtttggattttcttccggatcaataactggtgtatgctttttatttgttaacaatgcgatgcctaaattgtatgctggatcaataattgtaactgtccctgtccagccggtatgcccgtaagcattttcactggcatgagggccaaacatccattccacgcttttacttccgttccgcctccagccaagagcgaatgtcgggtctgttgctgaaggtgctgtaaacaggtcggctgttttctgatcaaataaagaaatgtttcggtatgaacctttgtttaacatgacttgcagcagtatggccatatcatctgcatttgagaacaatccggcatgcccagacacgccatccattgagtaaaacgctttttcgtcatgcacctctccttgcagcgtgtttgtgcggatgttagggaattgaataacgccgtcacgtgtattgcccattcgttcagtagctgcgaactgtttcggtttaaagcccttttgcagcggattgtacaaggtatgcttcagcctgagcggtttgtagagctcttgctccgtgtagacatcaagcggtttgccagtgagtttttcgacaatacacccaagtagaatatatccaatgtcactgtatacgtgttttgtcccggtttgataatcgagcggaattttcgtcaaatattcaatcgttttgtcccgttcttgggaatagtacttaccggctttttccggcgtgtaaaagtaaaagcttgatgggagtcctgattggtgctggaggacatcgatgacacgtatcttgtcttttccttttatgaggtcacccggctgatccttgaaacccggcaaatatgcagaaactttttcatagacgtcaagttttccttggctgactaagcgctgcaatgcaaaatttgttgcgtacatttttgtatttgaggctaagtcaaacatcgtgcgggttttcattttggccggacggcgcagcagttctgatccttcgtactttttactgtagccgtatgctgctttttttatgatgcgtccatccttcaccaccacaagaacggcgcctggaaatcctgctgcaatatcccgttctatcatctgatctaccttctttagcttcttcgtcgagaattgtgcagtttctgcatttatggttttcggctcaaccaagttgtctgctgtttgtgcgaaggtttcatttggcgcgaatatcgatagggttaaaatggcactgaatatgaacagtgtctttgttttcacaggctagcccctttctgtgcttctatcccgtttactatccctaaaacagaaacaatttaatcgaactgagaagccatttcatctttatatccgaatgcataggtcaataaaaagccggccgcgtaggaaataaagagcccaacgatatacaggatgatttgcgaaggcaggactagaaaggaaagcggcagtccggagacaccaatcgcaatggtggctacttgaaaataagcttgaaaggcgccgccgattccagctcctaaacatgctgttaaaaacggacggccaagcggcagcgtgactccgaaaataagcggttcaccaatgccgagcagtcccgatggaagcccgccggcgattgctttcctcagtgttgtttttttcgtcttcacgaaaacggcaaaggccgcgcctacctgtcctgcacctcccatagccaaaatagggagcagaggatcattgccaattgaattgatcagttccatgtgcacaggcgtcaagccttgatgcagtccggttacgacgagaggaaggaaggttgcgcccagaataaagcccgcagcgatgccgccgatgtccaggatggacagtaggccggatgtaatagcatcagaaatgaatccgcctaaaggcataaatacgacatacgttacgattccggtgattaacagtgaaacggtgggtgtgacaatgatatcaagtgattgaggaataaaacggcgaataaattgttcggtgtaagcaatgaatatggctgcgaaaaggacgccgatcagacctcccctgcccgggagaagctcttctccaaataaactgatttttgcgatctccggattgataatcaagatcccggccaaagccccaagtgcgggtgtcccgccaaattctttcgaagcgttaataccgacgagaatgccgagataagtgaacagccctgatccgatgactgtcaggataatcgcaatttgtgagtctgcagagagccagcctgcttgaataattgctttggtaatcccagtaattaaaccggaagcgactagagcgggaataagagggataaaaatgctggcaattttacgtaagaaaagtttaaaaggagtggcatttttccgattgatatcggctttctttttggccgctgcttctttgacatcggcaccttcttctgctgacacgagctttgagaaagcagctgtaacatgattgacgactcctgtgccgaggataatttgtaaggtttcagcttcaacgacccccaatacgccgtcaagctttcttaaaccctgagcatctgctttgctttcatcgtaaggcgtaatgcgcaggcgtgtcatgcaatgcgtatatgaagaaatattggattttcctccgcatagctcaaggattttctgtgcgagatgatggtagttattttctttgctcattaaaacccctccccttcaagatgccttatttttttctcatagattggatggctgctctcgttttatcgatataaccggttgtcgtttcatactgctcagccgccatgcctaaaaacaaaacatcaattataaaaagctgggcgaggcgggaggaagtggccgcacttcgaatcaaggcttcattggaatgggctgtatacaaagggacatcagccagtgcggagacggatgtctgactgaattgtgtgaggctgatcgttgtgatgcctttttccttggccatggcaaacagttcaatgatttcctgtgtctctcctgaaaacgaaatggcgaatacgatgtcgtctttatctgcatttgcaattaaagatgccacaagatgagtgtctgtaaacgcggttgcttgtttatgaatgcgaagccacttttgctgggcgtccttggcgacaatgccggaagcccccaggccgataaaatgcacggtatgagctttgagaagcagagaaaccgctcgttcaagctctttgtagtccatcaggtctgaagtatcctgaatggcttgaatggcattgccggccgttttttcggaaatggagggcagcggctcgtggggaacaatatcccggtagccctgaaacgtaggctttgccagatcgcccgctactctcatttttaaatcttgaaatccttttaaaccgagtgatttgcagagcctgatgacggcagcgtcacttgaattggctaaggcgctgatttcgttgaccgtgctttcgattgctttgtggggatgggctaggatataatctgcaagtttgcgctcggatggagggagcttatgcttcattgattggatgatggctaaaccgcctgtggccattctagttctctccttatcatggatggtaatgttcgattgctttgtcaatgaaaccgtttgcttcatcgagtaatgtctttgcttgtttctgatctgtgcttgttttgagcatgacgattgctgttttgacgtgatgatcggcttgttccagagtgtatctggctgtgtcgtatgaagcgtttgtaaggctttggataatgctgatggcgcgttcttttagttttttgttgctgacgttgacgtctaccatcaagttttcgtaaaccttgccgattttgaccattacagcggtagatatcatgtttagaatcattttatgagcggttgcggctttcatacgtgttgatcctgtaatggcctcaggtccgacgacaacctcaatgctgtgatccgcatccttgctgatggcggaattttcattgcaagtaagggcgatggtgtgtgctccgactttgcgggcgtatcttagggcgcctgcggcgtagggtgtgcggccgcttgctgcgatggcaatgacggtgtcatttgaagtgagctgtatgtttcttaaatcttcagctcctgcttcatcactgtcttcaatgccctctgctgcctgtaaaaaggcttcggggcctccagctatgattccgatgacctgatctgggcttacgctgtaggtgggaggacattcaacagcatccatgacgccgagtctgccacttgtgccggcgcctgtatatatgagccggcctccattttgaaacgattcataagcgcagtctacagctgttttgatgtcggggagaacctcttgaacggctgcagcgactttcatatcttcgttgttgatcattttgaggatgccgagagtgtttgctttgtggatttcaactgtttggctattgcgtgattccgttgtgagacggtgaaggtttaatggttctgacatgaggatgccccctgttttaaaatgatatatctcaatattcagtatattcatttctgttatgatatttcaactatgtttttgaatttttgaaattttatttcactcaagtctataagaaatgatgaaggatcaactgttctccaagcgggccgattcttcgccgtcctttatcaaggaacccgcttttcatataaaggtgttttgcgcgtatgttcagatgattgacggccaagatgatttcgtcgcaccatggaaaatatccgctcacaaaagcgggaagcaaaagcatggcttttttcgcatagccttttccgtgatgcacagcgtttaaagacagggagctgagcagtaaagcaaatggattgttagaataagaagcaagcgtttcttttgatgcatgtaaaatgaaaaaaccgactggaaggtcgtcttttaagatgacaaccgggtatcggtcctgtatgcccagagcctgagacagcacctctttcgggagggaggtaaagcgtttgtcatcgttggtgagcgtgaatgattgaagctcgggcaagtgttcaggcttatagaaggataaagaaatgtcttgagtcatgtggtggcctccttacaatatgtcgtcaagctcgttttccgaaatgacgcggtagcccgcttgttttaacagtgcggcggttactccgctgccggtgatttttttaccagagaatgtgccgttatagataaaaccgcttccgcaagatggactgttttcttttaatatgacggcagaagcgttgatttcttttgcgtaagccaatgttttcgcggcgccttccatatatagttctgtgacgtcttctcctgaagctgtcacgattttcgctgttccattgagaacatcctcgccggtgcctcctatgatttctgcgggttcgcgtggggtagagaagccgccgagaagttcagggcaagccatgactgctttcttttcatcgacgagttttctgattttctccgacgctgcgtgagagccgttatatctgcattcaatgcctccaaggcaagaactgactagaatcatattgggttctcctctcttgctttacttgtctctatcataaaataaatggctttagttgggaggctttttcagttaaaaaaggagttaaaaagtttgaaaataaaaaaattaatttttctctttacaaacagggagtgacctgtatataataacttttgtcagctcgacgagaacacaacggcccgttggtcaagcggttaagacaccgccctttcacggcggtaacacgggttcgaatcccgtacgggtcaccatttggaggattagctcagctgggagagcatctgccttacaagcagagggtcggcggttcgagcccgtcatcctccaccatcttgccggtgtagctcaattggtagagcaactgacttgtaatcagtaggttgggggttcaagtcctcttgccggcactgttttttcaaaattttatgtggaggggtagcgaagtggctaaacgcggcggactgtaaatccgctccctcagggttcggcagttcgaatctgcccccctccaccattattgggctatagccaagcggtaaggcaacggactttgactccgtcatgcgttggttcgaatccagctagcccagtcacagacacctttgatcaaaaggtgtcttttttcttttcgggaaaatcattccaacttctaactgttcagtctgtataataattttaaaaatatgttaaggtagtttattcacgaattaccatctacaccctgccaaaaatttgataaacttattttataaaaaaattgaaaccttttgaaacgaagctcgtatacatacagaccggtgaaggcagaggttagataaatatggaaatgatgattaaaaaaagaattaaacaagtcaaaaaaggcgaccagaatgcatttgcggacatcgtagatatttacaaagataaaatttatcagctttgctaccgtatgcttggcaatgtgcatgaggcggaggatattgcacaggaagctttcatcagagcgtacgttaatatcgacagttttgatattaaccggaaattttcaacttggctttatcgaatcgcgaccaatttgaccattgaccgcattcgcaaaaagaagccggattattacctcgatgcagaggtggctggtacggaaggcttgaccatgtattctcaaatcgccgcagatggtgttttgcctgaagatgcagttgtgtcgctggagctctcaaacacgatacagcagaaaattttaaagcttcctgacaaatacagaacagtcatcgtattaaagtatattgacgaactctcattaattgaaatcggggagattctaaacattcctgtggggactgtgaaaacgcggattcacagaggcagagaggctcttagaaaacaattaagggatctttaagtggggtgatgaaatgagctgtcctgaacaaattgtgcagcttatgcatatgcatcttgatggagatatccttccaaaagatgaacacgtattaaataaacatctggagacatgcgagaaatgcagaaagcatttttacgagatggagaaatccatagcgctcgtacggagcacatcgcatgtcgaagcccccgcggattttaccgctaatgtcatggcaaaattgcctaaggagaagaaaagagcttctgtaaaaagatggttcagatcccatcccgttatcgcagctgctgcggtattcatcattttgatgggcgggggtttttttaacagctggcataatgaccacaatttcagcgtgtccaagcagccgaatcttgtggttcataaccatactgtgaccgtgccagaaggtgagacggtcaaaggtgatgtcactgttaaaaacggcaagctgattattaaaggcaaaatagacggggatgtaaccgtcgtaaacggcgaaaagtatatggcctctgctggacaagtcaccggtcagattgaagaaatcaatcaattattcgactggacatggtacaagatgaagtctgcggggaaaagtgtactcgatgcattcgatccgaacggagaagagtaaagcgcgttagccgctttgctctttttttgtgggctgagagggctggcacatttcacttgctaaatcgaaatgtggtataatgggctcgctatgtaaagtacatatgcgtaacacgtaaaacacaaaatacgaaatgactgaaatcttggaggacgaggaaatggcttttgaggatatcccttttttgcagtacctcggcaatgccgttgatattctccttgtttggtatgtgatatataaattgattatggtgatacgtggcacgaaagcggttcagctgttaaaaggaattgtagtcatcgtgcttgttcgtatggccagccaatatttgggcctcagcacacttcaatggctgatggaccaagcgataacatggggatttttagcaattattattatttttcagcctgagctgagaagagcgcttgaacagctaggccgcggccgctttttttcgaggagcggcacgcctgttgaagaagcgcagcagaaaacgattgaggccattacaaaagcgatcaattatatggcgaaacgccgtataggcgccttgcttaccattgagcgggatactggaatgggggattatattgagaccggcataccactgaatgccaaagtcagctctgagctgctgatcaatatttttatcccaaacaccccgcttcatgacggtgcggtaattatgaaaaataatgaaattgccgcggccgcctgttatctgccgctttctgagagcccgtttatttcaaaagaactgggcacgcgacacagagcggctgtcggtatcagtgaagtaacagacagtttgacgattattgtgtctgaagagaccggcggcgtcagtgtggcaaagaacggcgaccttcacagagagctaacagaagaggcgctgaaagaaatgcttgaagccgagtttaagaaaaacaccagagacacttcttctaaccgctggtattggaggggcaagaaaaatggataaattcttaaacaaccgctgggctgtgaaaatcattgctctgcttttcgcgctcttgctttatgtggcggttaacagcaaccaagcaccgacgccgaaaaaaccgggtgaatctttctttccgacatcaacaactgatgaagcaactctgactgatattccggttaaagcgtattatgatgatgaaaattacgtcgtaacgggtgttccgcaaacggttaatgtcacgataaaaggctcgacaagcgccgtgaaaaaggctcggcagaccaaaaactttgaaatatatgctgatatggaacatttgaaaaccggcacacataaggttgagcttaaggccaaaaacgtgtcggatgggctgacaatctcaattaatccgtctgttacgacagtgaccattcaggaacggacgaccaaaagttttcccgtagaagtggagtactacaacaaaagcaagatgaaaaaaggctattctccggagcagccgattgtcagtccgaaaaatgtgcagattaccggatcgaaaaatgtcatcgataatatttctcttgtaaaagcttcagtgaatttggaaaacgcagatgaaacgattgaaaaggaagcgaaagtgactgtctatgataaagacggaaacgcgcttcctgtcgacgtggagccctcggtcatcaagattaccgttccggtgacaagcccgagtaaaaaagtgccctttaaaattgaacggacaggaagccttcctgacggtgtcagcatagcgaatattgaatccagccccagtgaggtaacggtttacggctcacaggatgtgttggattctcttgaatttattgacggcgtcagcttagatttaagtaaaattaacaaggattccgatatcgaggcagatattccgcttcctgacggtgtcaaaaaaatctcaccgtcaaaggtgactttgcatatagaagtcgacagtgaagcggatcagaagttcgagaatgtccctatcaagactgtagggctgagcagctcacaaaacattgaatttcttgatcctgaatcacaagcgatagatgtaacggctaaaggctctcccacgaatataaaaaagctgaaaaaatcagatattgaattgtatgtgaatgtttcagatttagaggacggggagcatagcgtgaagcttgaagtgaacgggccacagaatgtaacttggtccttggggcgtaaaaacgccaaaatcaagctgacgtctaagaaaagcaatacatcaacgaatgataacagcagcaatacatcagggaaccaggacacagataaacaaacaaatgatcaaaagaacaatcagcaagaagatacaaagaacactgataaaaacaacaacgatcaaaaccaagacgaaaataaagatcaaaaccaagatcaggatgaggatgaatccactgcgaattcacaatcctcatcggaataaaaaaggagcgattataaaatgggcaagtattttggaacagacggtgtaagaggtgtcgccaatagtgagcttacacctgagctggcctttaaagtcggacgtttcggcggttatgtgctgacaaaagacaaacaacgtccaaaagtgctgataggccgcgatacacgcatctccggccatatgctggagggagcccttgtcgccggacttttatccattggcgcagaagtcatgcgcctgggtgttatttctacaccaggtgtatcttatttgacaaaagcgatggatgcagaggcgggcgtcatgatttccgcttctcataacccagtgcaggataacggcatcaaattctttgggggagatggatttaagctttctgatgaacaggaggctgaaattgagcgcctgatggacgaacctgaggataagctgccaagacctgtcggagcagaccttggacttgtaaacgattattttgaaggcggacaaaaatatctgcaattcttaaaacagacagctgatgaagatttcacaggcattcatgtggcattggactgtgccaatggcgcaacgtcatccttggcgacacacctgtttgctgatttagatgcagatgtttctacaatggggacttccccgaacggattaaacattaatgacggcgtcggttcgactcatcccgaagcgctcagcgcgtttgtcaaagagaaaaacgcggatctcggccttgcattcgacggtgacggcgaccgcctgattgctgtcgatgaaaaaggaaatattgtagacggcgaccaaatcatgtacatatgctcaaaacacctgaaatcagagggccgtttaaaggatgatactttggtttcaaccgtgatgagcaacctcggcttctataaggcgctcgaaaaagaaggcatcaaaagcgtacagacagctgtcggcgaccgctacgtagtagaagcaatgaaaaaagacggctacaacgtcggcggagagcagtcaggacatcttattttccttgattacaacacgacaggggacggattattgtctgctattatgctgatgaacactttgaaagccacaggcaagccactgtcagagcttgcagctgaaatgcagaagttcccgcagctgttagtcaatgtgagagtgactgataaatataaagttgaagaaaatgaaaaagtaaaagcagttatttctgaagttgaaaaagaaatgaacggcgacggccggattttggtgcgcccttcaggaactgaaccgctcgtccgtgtcatggctgaagcgaagacgaaagagctgtgcgatgagtatgtcaatcgcattgttgaagtcgtccggtcagaaatgggattagagtaacgaagtctattatcagagagtgaacaagacaagcgaggtttacataagataattgtgagacatacggcaaagttgtttaaaaaacaattgaccgtttatgccacatgttgtaaaatcaagcttgtcttgttcttattttctcaataggaaaagaagacgggattattgctttacctataattatagcgcccgaactaagcgcccggaaaaaggcttagttgacgaggatggaggttatcgaattttcggcggatgcctcccggctgagtgtgcagatcacagccgtaaggatttcttcaaaccaagggggtgactccttgaacaaagagaaatcacatgatcttccaaaaaacatgtaggaggggacgattgaaagtccccttgaaatttgactttcttcgtctccttttacaatcttaggaggaagaaaaatatgtgtggaatcgtaggttatatcggtcagcttgatgcgaaggaaattttattaaaagggttagagaagcttgagtatcgcggttatgactctgctggtattgctgttgccaacgaacagggaatccatgtgttcaaagaaaaaggacgcattgcagatcttcgtgaagttgtggatgccaatgtagaggcgaaagccggaattgggcatactcgctgggctacacacggcgaaccaagctatctgaacgctcacccgcatcaaagcgcactgggccgctttacacttgttcataacggcgtgatcgagaactatgttcagctgaagcaagagtatttgcaagatgtagagctcaaaagtgacaccgatacagaagtagtcgttcaagtaatcgagcaattcgtcaatggaggacttgagacagaagaagcgttccgtaaaacacttacactgttaaaaggctcttatgcaattgctttattcgataacgacaacagagaaacgatttttgtagcgaaaaacaaaagccctctattagtaggtcttggagatacattcaacgtcgtagcatctgatgcaatggcgatgcttcaagtaaccaacgaatatgttgagctgatggataaagaaatggttatcgtcactgatgaccaagttgtcatcaaaaaccttgatggtgacgtgattacacgtgcgtcttatattgctgagcttgatgccagtgatatcgaaaaaggcacgtaccctcactacatgttgaaagaaacggatgagcagcctgttgttatgcgcaaaatcatccaaacgtatcaagatgaaaacggcaagctgtctgtgcctggtgatatcgctgccgctgtagcggaagcggaccgcatctatatcattggctgcggaacaagctaccatgcaggacttgtcggtaaacaatatattgaaatgtgggcaaacgtgccggttgaagtgcatgtagcgagtgaattctcctacaacatgccgcttctgtctaagaaaccgctcttcattttcctttctcaaagcggagaaacagcagacagccgcgcggttctcgttcaagtcaaagcactcggacacaaagccctgacaatcacaaacgtacctggatcaacgctttctcgtgaagctgactatacattgctgcttcatgcaggccctgagatcgctgttgcgtcaacgaaagcatacactgcacaaatcgcagttcttgcggttcttgcttctgtggctgctgacaaaaacggcatcgatatcggatttgacctcgtcaaagaactcggtatcgctgcaaacgcaatggaagctctatgcgaccagaaagacgaaatggaaatgatcgcccgtgaatacctgactgtatccagaaacgctttcttcatcggacgcggccttgactacttcgtatgtgtcgaaggcgcactgaagctgaaagagatttcttacatccaggcagaaggttttgccggcggtgagctaaagcacggaacgattgccttgatcgaacaaggaacaccagtattcgcactggcaactcaagagcacgtaaacctaagcatccgcggaaacgtcaaagaagttgccgctcgcggagcaaacacatgcatcatctcactgaaaggcctagacgatgcggatgacagattcgtactaccggaagtaaacccagcgcttgctccgttggtatctgttgttccattgcagctgatcgcttactatgctgcactgcatcgcggctgtgatgttgataaaccgcgtaaccttgcgaagagtgttactgtggagtaataaatgtttaacccctttggataagattgtctaaaggggtgtttttatgtccaaaagagaaagaacgtctacagtggaaaaatggattaaagaaggtgatgggacaggactcgactatctatcggccatggctatagatttaagatgtttccacattaggtcggtcaatcaggttaaaaggcattaagacttttgcctaactgagttttctaatgttaatacagatataagagagcagttcctcattatgaaacgcttttgatagcagttggaataaagcatgctagaaatccgaaaaccggagagcctattggaatgataacgtgtttttttattgtcaattaataaaggcaaaagaattctagaagtcgcacttacaatgtacttgtgggccttaggttttaaagctcattctttttttattgagtacattccggtttaagttgaaatgattcagtaaaggacacgccataaataaaaggtagcgtatgattgccattctttccatggaaccgatatttctaagatttcatctttcgtaggctttcgattcatattacgtaatatttttatcgaacgaattagacccacatcatcgattggaaaagctgtcgggaacctaaggcagcgcattagaacataattggctgtccaaggaccgattcctcgtattttaattaagtttttttcagcatctttaaagttcattttcattaatttttccctcgataattccccacttgccattaatctggctattccaatgatatattcacttttttttaccgtcattttaatatctgccaggtcggtaggggttaaccgtgcaattcgctcgtacggtgggaacacccaatactttttaccattccattcaatagaatcgccaaatgcttctacaaattgcttctttaaggagtacgcgaaggctaagttaatttgttgccctaaaactccccaacataaagcttcaaataaatcgggaatgccgatcactcgcaacccataaaattttcgggcaggcattttaagtaatggatctgcttttgccatttcataaaatggagttaaatcgttatcaagatcaaaccattcatgaatatattttacaatctcttcccgtttccactgctcaacaggtctagaatcgtttaggaattgaacaatcatttgtttattattgattacgcttacctgcactaaggaccgaatttccccaatggctataacttttgtaatgatattgttctctatttcatacatgcattcatttttttccctggttaggtagccaaggttcgcattcatgtcgaaaatttcaggtaatgtaatgacaataacatcattgacttcatgccatgtcactttttcattctccttatcttaaataattataagaaaactcacgctggttgaaattagtttatcacataataagctttactcattttgttatcttgctattacattctaaccaccttatttttttctatttatgaggttatagtgttagttatcaagaatgctaaacgggagtggattaaaatcgcccaagatataaaaacgtgtgtcgaaaacgtaaattgggattcaagtcaaaatgaattagatgagcattgtaaggaggggtgagataaatgccggatagtatcaataacggacataaagagagccatgatcagagaaccttaaatgatgtagaaatgctaacaaatgaaaagtggcatgcaattataaataatgatgcagcgtacaataatcaatttttctacgctgtaaaatcgacagggatattctgtaaaccatcctgtaaatctcgcgttccgaaaaaagaaaatgtatgtatttttccaaacgcagaacaagctctccacgcaaattttcgcccttgtaaacgttgcaagcccactaatgaaaaaatgcctgatagcgagtgggttgatctaattactgaatacattgataaaaatttcacagaaaaattaacgctagaatcgttagcagatatttgtcatgggagtccgtatcatatgcatcgaacatttaaaaagattaaaggcattacgctggttgagtatatacaacaagttagagtacacgcggctaaaaagtatttgattcagacaaataaagcgattggagatatcgctatatgtgtgggtatagctaacgcgccttattttattactttatttaaaaagaaaactggacagacaccagcacaatttcgtcaaatgagtaaaatggaggaaacgtacaatggaaacaaataaaccaaccctttattggtctttactaatgttcaagaattgggatttttatattgcttcaactttaaaggggcttgtgtttgtaggttcacagaacaaaccaatcgaggaattgttcgaatgggctaagaaacgctttccaggaagtcttcttgttgaagatgatgataagcttgaaccctatgctgttgaaatcactcaatatctagaaggaaagcggaaaaactttactgttccagttgagtacgccggtacgcaatttcagctagccgtctggaatgcactttgtgaaattccttatggacagacgaaatcctattccgacattgcaaatgatataaataaaccagcagctgttcgtgctgtaggtgcggctattggggctaatccggtattaattactgtaccgtgccatcgtgtaataggaaagaatggctcattaactggctatcggggcggatttgaaatgaagacactgctcctcgatctggaaaagcgagcttcatctgaaatggatgttcctcattgaaagtgaatcatctataatgggttggattcttttagaggaaagtaaagaccagtttactgataaacttgacaacttttaaaatttagcatatcttatacgtaacttaataatcgatgcagatgtttatttttccttttaaaatatgtaggcctttagcattcttttcatatttaattttaaatattgataggatgaaaaagtatcctaataaaaaaggaagagaacatgagtcgatttatttgataatcaggactatattaaaggaaatgaaaacatagcataaagtaaagaccaataataaggtagcacttcaaaaaacttcgctgaagttagttgaagtgaagccgacaattttcaggattcaatgatctaacataatcattgaaattttgaagttgtcggcttttttgttggaaaaaaatagagataaataaaaattgaaataaataatagacaaatatgatctgattgaaagatcttttgaccaataatgagttttaaaaaagggagaatttagaatgttagtttcgctgagtttgtcatcattattaacattattttttattatgcttatggcttctgggattagtggactattgtttttacatccgcgagtacccttgagttttgttcgcattcatattgggatcttggctttaccacttttggtttccttactgattcttgccgatagtggtgtgagcggaaatgttggcccttggcacttagattccttagcttgtttaatgactttctttgttcttgcaattggattcatcattcagcgtttttctgtacgttacttaatgggggatcgatcttatcgaaaatattttacgctttttactttcacaacaggagctgcttctatgacatggttaagtggtgatctccgcttgatggttctattttggggagcaactcttgttggtttaaccttacttataaggttaaacagtgcttggcaagtggctagtgaagcagccaaaatttctggccggttatttttgttaagttggttttctttgttttttgcgatgatgtggctttttcatgccacaggtcaatggcagttatcattggttgtaacaaatgaaagtttagctgggctgggagaatgggagagaacagggattcagctattgattgtactggcggtgatcattcctgcagctcaatggccgttccaaagatggttggttgagtctattgttgctcccacccctgtttctgcaattatgcatgcaggtttagtaaatgctggaggaataatactaactcgattttcacctctatttcatggtggtatcgcttcgattattttacttctgcttgctggcatttctgtattgattggaactggaattagtttagttcaggttgattataaacgccagttagtaggctccacgattggacaaatggggtttatgctcattcagtgtgcattaggcgcctatatagcagccattattcatcttattttacatggtttattcaaagctacgttgtttctacaagctggttcagcagtagggcgtcatgaagtatcggctcgcactaatgaaagaacatcctatttatggatcatggctggtcggattttatccttagttataggtgttgctttttggctcactgctcctggagacgggtatcacttaatcagtgcgctgatcttagggtggtcattgtccgtttcttggactcagcttgtcgcttttggagagggccgaattggccgaattgccggcttaactgttttaggaggagcagccctcgtatattttatcattcataaccttttctataagtggctgcatacaaccatttttcaaagtgttcaacctccaatgtcagctgtcatgattgtcgtatgtctcttactatttggcagtgctttaggtacgtgggttgctcgtcatcgttcttccgtttttttcgcggtactctatctttggttagttcgattaggtgaagcaaaaccaaagtcagtagagagtcacccagactaccttaaacaatatatttcataaggagctaatctgagatgggcattacatccgtattaacgaaagataatgtaaaaaagatagatacagatattgatgttcaagaaagggatcttaacgttttcattacatctgccagccgagtgattgcgccactttggcctatttctacatttgctgcacgtaatccgtggatgggacttgaaaaccaaccttttgatcaggttgcaagttggttgaaaaacactcgcgatgttgatatatatcctagtgcgtctatgatccgttcagcaaagaataaaggtgagattgatgaagattttgtggaaatggggctgcagcgttggcttgattcacattcctatcacatcccacgggacgtggcagagcgattttgtcatgctgcattaaagttagatcccctgccttccgaccttttatcatcacatgagctggagaaattagtaagtgaatgtagtggattggatcatatcgagaatgtgtttatgcaaccactaagttcgtatatagagaatcaagatggtgaaaggctagtcaatatactagatcatcatgtcattaagtggagtaaattatatcttgatgactctcaagcaggctggacaatgcctaatcgtgaggaaggtttttatcgtgcttggcagcatctcattcaatatgatccagcacttagtaaaaagcagcgagaaagggtaaaaggttggccgaaagaggcacatttggctttacaggaagctttattcgcactagaaatcccagagtcagaaatccagacttatcttgaaggtcatttactttcattacctggatgggcagggatgatgctttggcgctcccagcaatcgagccacgaacatgcactcctaacagaatatttagcggttcgaatatccatggagtgggctcttataaagccatacttacctttgactaatgaacgatctaagaaaaaaatttcaattgctccccttatagcagcttggattcattggggtgggcttacattagaagaatggtcacagatgacggccattgaacaaaacgaatatttatcatttgcctacagctttgatgagaaacttcgcaagaaactttggttagaagcttgggaacaaacgtacactgatcgattaagccagaagatcatctcgaaacaacgtgaaaccggcggtaaaaaatctgcattagctcaattagcattctgcatcgatgtacgatcagaaccttttcgtcgtcatctagaaaaagaaggcccgtttgaaacgattggtattgctggtttcttcggggtgccgattgcaacttgtgaacttggcagtaaacacagtcatgcttccttgccgatcatacaaaaaccgcaaaataaaataaaagagttcgcagatgaggatgtattcaaaaaatacaatcaacggaagcaagcaattcattctttaagccatacctttaaaacgatgaagcagaatgcgctttcgagcttactactgcctgagctaagtggaccttggcttactctgcaaatggtagcccgtagctttgtgccaagaaaggcgggtcgtttcattcgtaatctccgtgaggcttggttgcgcaaacctgatacaaaactctcgcttcatcatgatactacagaggcagaaatacctgtgggttttactgatgaagaaaaagtgaactatgctcgccaagcattaaaaatgatggggttaacagaaaacatcgcacccttggtcgtgatctgcgggcatggcagtcaaagcactaataatccttattccgcagcccttgattgtggtgcctgcggtggagcggccggtggattcaatgctagagttttagctgctttatgtaatctatcagaggtacgagaagctcttttagctgaaggaattcaaattcctgaggatacggtttttgcagcagctgaacataatacaacagtagatgaattacattggctttatgtaccagagctttccgaagctgcacaagaagcatttgaacaaattgaagccgtgatgccgaaagtgagacatcatgtaaacgcagaacgtctagcccaattaccgaatttccaatcgaagctaaaaaatccgaaggctgaggcaaaccgatttgcggaagattggagtgagatacgtccggaatggggactggctcgtaatgccgcttttattatcggtaaacgtgaactaactcaggattgtgatttggaaggcagagcctttctccataattatgattggaagcaggatgaaagcggtgaactcctagcaaatattattgcaggacctggaactgtagcccaatggattaatttacaatattacgcatcaacggtagcacctcattattatggcagcggaaataaagcaactcaaaccgttactgcaggtctcggcgttatgcaggggaatgcaagcgatttgttagccggactgccttggcaatccgtcatggaatcagatcacgaggcctatcattctcctcttcgtttattgatactcatccaagcacctagagaatatgtagaacggttattaaataatgattcagcatttctgcaaaaagttcaaaatggatgggtccgactggctagtcttgatccagaaggatgttgggaaagctggtaatgatgaatctaagcatttatcaaatggatttgttattcaaaataaaaatgataaacataaggaagaggtgtgctgtatgaatgtaaaccaaaataaaaaagtattatttttgacggatattgaaaacggtttggagcctattttacaagaagcgactaacacttctgcagagaatatgttgactatacaaagctatggtgccggtatttcacatccttatggagaaatcatgaggtctgttatttttgcgatttaccaggaagatgttgaggagatttttgtagtaggaacaaaagataagaagacttccgcaggtaatggactaactcaacttgaaacaatgaaagataaaatacaaacattggattatctttttcaaaattgcaagcctgaatttttaggtggtacggtcgatgaatggctaaatgaaaatagcagtgacaccattgaaaaaagtgttgatatgattcgacatcatcccctagtgccgtcatatgttaaagttagaggtttattcgttcatcataaggatggaaaaccctcaatcgcggagggtcctgatgctaaaacaggtcaagccatacctgatcattgcttgtcacgatgaaatacaggttcaacttctaaacgcacccatatatggagaaagcagttctaaggagattgtatgagcgctaatttaactgattttgtcacgaaaacaatagaggacatgaactcgtttgatcgtgaaaatatggaatttatgaaaaaactaattagaaaagcaattgatttttatcatctaaagtcttatgaagaagttgaggaaacccattcaggaaatgttcgatttttgcatgtccactctatgatggaagaaaatatgttatccaaaatgatagtggtcacaagaaacggtaaaactgatttggatattgaaggtgtatatgaaggatatgttgtaagagaatattaatgagacgaaatcacaaatagaatatgccaatttttttgctcaggagatgtattagatatgaaaaagtctaagggttctattgaatcagagatcagtaagtccattactcaatgggagaaggattatcttgggcgggggtctgtatctgttaagactgatatactgcgggacatgatcatcgtcaatttaaaagggattttaacaccagccgaatatgtagtttgtggatcaaaagagggtatgttatctatcaaacaaactcgttcggagttagttgaatcaggtatagaaggccttaaggatattatcttaaaaataaccggagaaaaagtgaaaagttttcatactgatttaagctcccggacaggtgaacgagtgatggtatttaaattatgtaatgatctagagaaaaatttggaaaagatcttataatctaaagaaaataaatgttaagacggtatggaatttgttgtgaattgaacataaagaactgccgattcttttgttttacaattatggtatcattgataacttttattcatatcctaagcggacataaagagatatcaattcatagtacactgttgtgttattcctgtcgaaagatctaacatccgctgttgttatgagcggatgtttttttacatctattttaaatacatgaatttgatgctggtgattagtcacttgaacaatatttgaaaacatccttgtcacctgccgggtttccccaagtgtttagtgacatgattatgagaccaatttcgtaaagcttgctgataaatttaagcggtgaacaaaattgatatgctgtcttcagtttcatttcacggaattagtcagagataaacctttaattaaatatatccaaaaaacggattgacatatcgaaatataacgatataataatcgatatggaaccaattgaagtattcaaagccttatcaaatgaatcaaggctgcaaattttgcaatggctgaaggaaccggatcgtcattttgcaccccatgaagggattgatatgaacacaatcggggtatgtgtcagtcaaataacagacaaattgaaaatgacgcaatcgacggcttcccaatatcttaccatccttttaagagccggcctaattaaggcggagcgtattggaaagtacacatattacaaaagagatgaagaagccattgggaaacttgctgactttcttaaaacagagatataaaaataaacatcaaaagatgtttatttttacaccatacatatcgacatattacgatgtgtttattttttataataacatatcgataattcgtgatatgtttattaataattaaggagtgaatgttttatgtctaacacttggaaaatttatattttagccattgtcagctttttagttggaacctcagagtacatcatttccggaattttggatcaaattgctcatactctcgggatcactttagctgccgcgggccagtttattaccattttttcacttgtatatgctctttctacacccgtacttatggcgttgacagcaagtatggatagacgcaaattgatgatgtatgccctaggtttgtttgtgttcggtaatgtcctggcttttgtattgcctggttatggatggtttattgcagcgcggatcattatggcgatgggagcaggtgtggtggttgtcaccgcattaacgattgccgctaagattgcatcggaagggaagcagggaagtgccatcgctacggtcgtgatgggatttaccgcttctttaatcattggtgttccgcttggaagaatgatagcagtagcattaggctggaagtctgtatttggagccattgctttgttgggattgatcgcaatggtcgttattttctttactcttccgcatactgaaggggataagcctgtgcctttgcttcaacagcttgctcttttcaaaaaacggaaagtggctatgggattatcaatcactttcttctggctcgggggatattctgttgcttacacttatttgtcaccgtatctcttgaacatctcaggtataaacggcaacttgcttagcggtgttttgcttatatttggaattgccagtttggttggatcaaagtttgggggatatagcaccgataaatggggagtgccctttacactcgttggcgggatgacgttgcatatcgtcacactgattcttctgtcacttgtcactcattcctatatcggagtgttggtgattctcatattatggtcgtttgccgcatggtccaccggtccgacacagcaatttcacctggctacaatagaaccggaaatgtcaggtgttttgcttagcatgaatcagtcaatgatgcaattcgccatggcggtcggcgcaggtataggaggggtttttgtggaaaacgtatcattggcctcgattacctgggttggtgcgttaggggttatgattgccattattgcatcattgctgattttcaattcgcaaccgaaacaagcgctaaaagatatcaatcaataatttcgaaagatctaacatccgctcgttatacaagcgggtgtttttttataggctcaagtagaaggcacactgaagctgaaagggatttttgccgacggagagcagaagcacagcaagttataatatactaggaagggaaataacggtatggcagaagggttctagcgcttctcgcctgtaagatcattactttgaggatgtgtcatcgtgaatcaaaagacgtacattgaaatgagcaggacatcgcagtacatcaacaaaatgagagagtattcagtgctaattgatggggctgagatgggaactatcaaagatggaggaaggctgcgaattgatttaccgcctggtgagcatgttattcaagtgaagattgcttggtgtacaagcccaactttgaggtttactttagcggaaggagaagtgttgaagtttagatgcggaagtccgcttcgaggttggaagttgcttttggcacttttttctgttttgggccgtcctgaaaattatctgtttatcgagcaggaagaagagaaaaaagctttgtggtgactgtatgttactacatggataaatatcgctgaattctgttttgtgaaagtttaattgacataagaaagaatggcagccttctcaatatcgtgctccttagagcaggctgtcaataaggaattctcggttgtcaattttcataaattcattgagaaactaaatactccttaatcaattgccacctgtcacgagcatgcatgatgaactccgatgcaatggctacaaccaggtttttctccggaacacagcaaatcacattcccgccatcgcctagtgctgagtatgagaaaacgccgtcctcatcactcagccaccatagataaccgtagttattggggtttatctctgttgattcgtcaatccatgatctccgaatgatctgttgattgttccaagtaccatggttcaaatatagataaccaaaccgagccatatcccgtggagtcagcgtaagtccccatcctccggttgagttgccgtccgggtacctctcacatgtttaccgaatagatcgtcaaagctgaatgatttcatttcataatgcggaatttctttcatgccgatcggtttaaataagtactcgttggcaaattcgcgggcgcttttgcctgtggtgcgggtgatgatggctgacagcaggtgtacgcctgcggtggagtatttaaatgtgccgatttttcctccttgacccagcataccgagcgtataggcgatccaatctggctgcatgcacatcttatcgagcggttcttgccagtcttcaaatggatagggagctgtcattgtgagaaagtggtgtcttgtttttgtttattaggagtattcgacacattctgggaaagaagcagtgttttccgaataaatccagctccaagaaaccaaatctaataaatggatctataaaaacgttaaaatcaaaagaactaatatatataggctaacgaaagagatatatcattttttgaaaaatagttttgattgcttatagttgacgagtattaagtgaaaacaatccaaaaaagtccctaacctaaattttaaatattaataattagatgcggttagagaaaaataagttaaatatttgaaaaaaatgttgaaaaaagacatataaaatgatattattacctatataagtaattaatttcttaaggaggaacgaaaatgaagaaaaaaattgctgcatttctactattaacaatagtagcgataagcacgataattcctgtcacagtatctgctggaagcggggaaaagtggaactatggttatgacaaaaagaaaatgcaggattacaatgattactaccattggctttatcgtcacaattcgtcaataacaaaaaaaggtataaattatccaggtcgtattgcccaacctaaatattggtccaaattaagactcgattataccggtccttataaagtttcctaccacaaacacgtttacaaatagaaaatttttcaaaagggatttatattataaaatataagtcccttttgcattaagataaataaggagaaaatatgattgaaataaaaaatatgaacaaatcattcaatgaaagaaaaatttttgaaaacttaaatttggttattgaacctggggagtttattggaattattggaaagagtggaaagggaaaaactacactgctaaatataattggcacgttagaaaaagcagatagtggttctgtaaaaatattagatagggatataaatagaaaaagaaataaaagatatttacttagacatcacttaggatttatatttcaaaactatgcattaattgataatgcatctgtgaatgagaatctagaaatcgcacttaaacataagaagatgaatagacaacaaaaaagaactgctatgtcttctgcattaaaagaagttggtttagataactatggtaaagaaaaagttcatactttaagtggtggggaacaacaacgcgttgccattgcaaggctgctgcttaaaaatcctactttgattttagctgatgaacctacgggatcattggatactgaaaacagagatattataatatctctttttcaaaaactacataaacaagagaagacaatcattatggtaactcacgataaagaactaataaaaattttttcaagaactctacaattataaagggggaatagattgtgaaaaaattattattccttctcgttattactacctttatagttgtaagtttcctatcgataaagcaatttgaatatttacagtttcaatcttttaatcataataatgttcatgattcatggaatgttgttatagatgaagggaattctaaaatcggtaaaaaagataattttaaaatgttggaacaaatagcatttgaatctaaagttaatttgcaacgcatatcatatgaaaatgataataataaagataaagtagtgtattatgttgttctctataatgcaccagaatattttaaagatctaaaactaagatatggggaatttttgcaaagtaatagtagttctaatgattttctatctactgttcaaacaaagaataagcatcagataggaacattagagatatttcatagttttgaacctattgaaattaggccaatgattgctgcggaaaaaacaaaagatattaaaggtacctatactgtaataggtgaaaaacatgctgaaaattttaagaaaatcgcattacagcatggtttttcaattaagttatccaaaaatgaagattcacaaagtgtgagtacaccatatccttatcaggaaatgatgtatataagctcattgattttatgcttattaataatgcttacaatattatatgatgtaagtaataactataaagaaattgctgttaggtatatgttgggatgtaatttatttcatataggaatatatctattcagaaaatatattcctatcattataagttccttgcttgttggaagtttaggtttaatattatatttatattggtataatcactatcaacaattcattgagttcgtatattttttatcgaaaaacattgctctgttatcaataatacttacaatcatttttttaataatatggtttagtactggaagtatcaatatcccacaaatgattaaaaataaaaaaccagtaagaatgtttttttatttaaatattattgtgcgctttgtactggcagtttttctattgttaggtttagagcaggggattagcaaatttcaggtgttaaaaagtacggtttcgaatcaagaaaaatggtctttgttaaaacaatattcttatttagggatgatagcttcaccagagcaaaaacaagaaactcttaattttcaaaaagataaagaagagcgaaaaaaaattcaacttttctataaaaaactagaatcccaaggggcgttttttatatatccttcggacttttactcgaatgattcacaaattacatctcaagacataaatccatggggagaagagggaagaaaagtagaaataaataagaattatttatcggttaatatgataaaagatatacatggaaaagatgtggggataccttcctctaataaagatgtaataaatgtgttagtaccaataaaatttaaaatgtataaagaagatattgaaagatcattagcagaagattataaaggtatatacgatataaaacgcgctgctcctgtaaaaataaatattatctatgtccagaataaccaatcttattttacgttttctacaaattcagctcaaaacagtaactataagattgtagatccgattgccgtaatagttaataataaatttgaccctttgatactagctaataatatttctatggggtatggtttttataccaaaattagtgaaggtaaagatcctttcaaaataataaaaagaacattagaggaatatgaattaaacaacatatggagccctgtatctattgcttattcaaatgtcgaattaaaaatagccaatgataaagaagcattacagttaacggctatatattgtggggtatttcttttgttagctgtagtattattaattttttcggcagtttattacttagaaatgaacaaaaagctattatcaatacaatggatatttggttatagcttttttgagaagcattgtttggtctatctctcggtgttggttttctggagtctgacttttatggttagcttttatgtatctggaaatattgcgttattgggtgaaatttccttatggttggcgattttagacatattattaacaagtatattattgattatgagagaatataatgttactaaacaagtcttaattaaagagtgattagtacaaataattgggggtaaacatttttgaaaagaaaaataaaatttcttacgatttgtttagcgtttgcattattatgtctaattatagctgcctattctatctcaacgaataaaccggatgatgaaaataatattaacaaaaatcaagttggaaaaacacaaaaacaagatagttcatattcagataatatggtatctgatcaagataataaatactatgtcatctatataaaacagaagaatggaacaggctcatcatttgtgcctgaaaagcttaatcctggtttcaaaaatgactctgatgattttaacgtaagtatttcctttgatgataaagggaacgtaattaataatgataaggtaattgaagtggaagacttctcactatcaaatactaataagaaaaaaattagaaaaatagttggtacaaataaatatgatgcagctttgaaagaagttgaagatcgagtgttagagactaagaaagaattagaagaaaattccaataattagtaaatatacaattagcagtattgaccgctgtaaataagaggcggtctttttgcttagaattaaatatttactaggtttaatagaaatttattttcatatcgtatccttttcgtattacgtgaaaggagcactatgaaagttgtactgactatagtttaccttctagacggagaataaaaaagagccggataaccggctcggtataagttaaaactgctttgttacgtcgtattcataatctatttttgcttttacgttgctcatcgtcgatctggctgtcgctaatgtattatatttaaaactccatacctttgccacactgagttgatctgacaaagagatatcataagaccctgaagtcgagctgtttacaagagcacggcgccattcgttgttttcgctcgtcatgatcaggtggcgtgtatttccctggcttggtgtttgagtggcggttgtctgaactctggttacaatggcatcacgcggtatcccagattggtttgttaaatcaaccttgatcacgctggagtcagaacctgaggggctaaggcttgtatttcctttattttcagcaatgccgctgaattggaatgttccgctgcctgatttgattcggtcttcaattgaaagtgtaaaatacatgtttccggtataggtgcctcgtgacactttcacataaaaggtatccgtcgtgttttgggcgtctgcatttgcataaataaaagaagaaaacgtattagggttaatgacttctgtcccttgagaaacaggtattctattcttatcataaatttcaattttcatccctgtatacgcgctctggtatgtactcctcacgtatactttttctcccttattagccgtaaaagtgaaataggcttcatcttgaccagcttccagtattgttgtatcgatatttttatatttccaataaccgatcggcattgcggtatcaaatgaattgtttcctgtgatagcagtgactccgacagctgatgccgaatacgtaaaggtgaataagacagacagcataacagcgaatggaataagccattttttcaccatgcaaacaacctccttttatttccatcatacataataacgatttaggtgtaaataaatgttttttgaggttaatatatacattatctttgccgataaaaaagaataagagagaatactcgggagggaattcaatgcgtctgaatcggcaatttatccgcactcagctgatggcacagaacatattgagcaagaatgcgcctgccaaacgggagaatgcgactgaaaatccagcggcagttctggaaaaggcatacagcaggcttaagtcacaatcttcaactgggggaatcaatcagttcaattattctaaaaccagcgtgtcgggaaacagcggggcgttcagcaaagtgtatcaatcagcgaatgatcgaacagtgacagacacaggggaagaaacagtgattcaatcccaaaacccctatgaatctgagagtgatatcagaatcaaaatactagatgaaaaatacagcaggatgaatgcgattaataaaacaaagtctgatccattaggctatattaaggataagtaccaaaattcaaagtctccttatttcagaagtgatctgtcagctgcagaaagacaggccgcttacgataatgaaacagaatggttattcaaagggaaggcgcaaaactataaccttcaggatgctgtgtttcggaatgtcacatttcatggggaagtggaagctgagaatgaaaaggtgtatcagcggggacaggttaaccagcagctgcaagtactgttgaatcgaaaccatattcatattccagaggggacagagctgacgtttacaatcacaccgattgactatcaggtgcgggtaagcgggacagacgatcaggatctgatcaagcaaattgagcaagtgctgcaatctggagacaacagcaaagaactatttttgcacatcatgaaaagccaaagcagtgattcagcacaattttccgaagaggcctatcaaaagtatcaggctgctcgtgagatgtatgaagttacaggctaccatttgaaggatttagaagtgattgatgggcggtacgtcacgcctgagggacgtgacttaatggatgtatataaggaagagcttgaaaaagatccagtgcagaaacaaacggcttcttatgctatatcttactatcgttcagagctcagtaaaatcgcggaagccgggtataatgccattccggatttcatcctatcaattgattacagcaatggatctctgagagatgtgggacaaagcaagagctatgggaccggagataccgggtggcttgaagcattaaagcgtcaaacgggtgtgaattattaggtaagctgttcatgtaggacagcttattttttatgagaatctaaggggtgaattaatcccaatattcaaataattttattatttttatataaaagattttaaaagaagtgaacgattcaaaactctgaacaaaggtgtttgcctgaaaaaaacaattgtattttccagagaaatttattatgatgaaataagtaatttaggagattatataacaattttaagtttgaattttctgattgttatcactgattcatgtgaaggcaagcaggtctgctgttttctcatttatgagtattttgttaggaggaggaagaggagtggcaaataaagaattaaagaggggcctgggcgcgcgccatattcagatgatcgccttgggcggtacaatcggtgttggcttgtttatgggttctgccagcacgatttcatggactggcccatctgtccttctggcttatgcaatatgcggaatttttatcttttttattatgcgtgcgatgggtgaaatgctgtatgtcgagccgagcacaggttcttttgcgacgttcggccatcaatatattcatccgatggcaggttatataacagcatggagcaactggttccagtggattatcgtcggcatgtcagaaattatcgctgtcggttcttatatgaagtattggttcccggatttgcctgcttggatacctggtatcgtggcaatggtgattcttggtgcggcgaatttaatttctgttaagtcgtttggcgaatttgagttttggtttgcgatgattaaaatcgtgacgattatcttgatgattattgcgggaatcggaattattttcttcggttttggcaatggcggagatgcgatcggtttgtcgaacctgtggtctcacgggggcttctttgcaggaggtttctcaggtttcttctttgcactgtctcttgtcattgcagcctatcaaggagttgagctgatcgggattacagcgggtgaagcgaaggacccgcaaaacacgctaagaaatgcgattcaaagtattatctggcgtattttgattttctacattggcgctatttttgtgatcgtgacggtgtatccttgggatgagctcaactcactcggaagtccgtttgtgtctacgttctcgaaaattggaattacggcagcggccggcattattaactttgtcgtgattactgcggcaatgtccggctgtaacagcggtattttcagcgcgggccgcatgctgtatacactgggtgtcaatggacaagcaccgaaattctttaagaagatttcacgcaatggtgtgccgctgtatggcacaattgcggtgctgatcggtttggctgtcggcgttgtactgaactatatcgcgccgccgaagatctttgtctatgtatacagcgcaagcgtgctcccagggatgattccttggtttatcattttgatcagccatatcggattcagaaaagcgaagggtgctgcattagataaacatccattcaaaatgccgtttgctccttttacaaactatttgacgattgctttcttgctgatggttctggttggcatgtggtttaacgatgatactcgtatctccctgattgtaggcgtgattttcttagcgcttgtggtcattagttattatgtgtttgggattggcaaacgcacgcaggccaatttgacaaaaagcgaacaagcagctgaataacgataaaaaagagacattcacggatgtctctttttttatttttcgcgtatggattttccctattttagcaagctatagggtaaagatagcagaaggaaaggtgttcataaaatggatgttacactcggttatttgcgcgaatcactttcgaatcatctagaaaatgaagtctgccagcgtatttgcaagaagatgctggcgaagcgttatgcaaatgaaggggaatttgtaaaagacttagatgataatgaaatgtcttttttgaaccatgtattagaaaaagaaattaagtatgcccagaatgaacaggatcaaaaacgggccaaggaattaaacgaggtgtatgaattactgctttgagaaaggcgggtaagaaatgggagcaattgaacgaagcggatatacatttcagccggagtttagcgttgtccgtcaaaacggagccatccatgtgtaccatcaaggagagtttgtggaagaaatcgaatttgaatttaacggggaatatcccgatcatgatttgattgaagagcttgtgaatcattattgttttgagcatgaaatttagagccctgccgtgcagggctcttttatttaggatgtgatcaggccatactttttcaggatatccacggtgatgtttttggcttttgtgccggaatcatcgacattggtgacaaagacataagagccatgctctgttttgatgaatccgacaaaccatcctaatcccatatctgtcaggcgagttccggttttcccgtagagcgtgtaatgatcgccttcctcttgaatcatcatgcgcttgacggttttcattaccggcttgtcaaatggaagctccttgttagccagtttctccaaaaaagtttcttgttccagcggagatattgtgagcgagctttgcagccaaaactggtcgattcccccgctgatatcctcgttgccgtaagatagtgtatgaagccatgttttcattctttcctcgccgatatctctcgctaatgcctgataataccagattgcggattcgcgcatggccgagccaagcgtatggtcgcggttccatgattcgaattcacgcttgaccccgtcccatcgttttacatcgtattcatctcttacagctttgacctgcaagccgattaaagcgttcacgactttaaaggtggattgcggagtttgtctttgatttgcccgttttctgttatagacaaatgtctgatccttttgtaaatcgtgaagaatgaaggttccatccgtatccttgaattcgtcatcgacattcattctgctgacattcaagtgtttttcatgagcagatgatgctgcgtggacggagaagccgccgatccctgcaatactcagcacaagcacaatatatatccattttttcattttgttctcccctttgttttgattaactaccttttctctctttcgtttgttcttcctttaaaaaataatcaaaaagcgcttaaatttggttttgtaaacaaatactgttactgggtttatagtcggaagataacgtgaaaatagagggtaaaaaggaaggcagggtaagcggatgaatgagcagattccacatgacaaaagtctcgataacagtctgacactgctgaaggaagggtatttatttattaaaaacagaacagagcgctacaattcagatctgtttcaggcccgtttgttgggaaaaaactttatttgcatgactggcgctgaggcggcgaaggtgttttatgatacggatcgattccagcggcagaacgctttgcctaagcgggtgcagaaatcgctgtttggtgttaatgcgattcagggaatggatggcagcgcgcatatccatcggaagatgctttttctgtcattgatgacaccgccgcatcaaaaacgtttggctgagttgatgacagaggagtggaaagcagcagtcacaagatggcagaaggcagatgaggttgtgttatttgaagaagcaaaagaaatcctgtgccgggtagcgtgctattgggcaggtgttccgttgaaggaaacggaagtcaaagagagagcggatgacttcattgacatggtcgacgcgttcggtgctgtgggaccgcggcattggaagggaagaagagcaaggccgcgtgcggaagagtggattgaagtcatgattgaagatgctcgtgccggcttgctgaaaacgactcccggaacagcgctgcatgaaatggcttttcacacacaagaagatggaagccagctggattcccgcatggcagccattgagctgattaatgtactgcggcctattgtcgccatttcttactttctggtgttttcagctttggcgcttcatgagcatccgaagtataaggaatggctgcggtctggaaacagccgggaaagagaaatgtttgtgcaggaggtccgcagatattatccgttcggcccgtttttaggggcgcttgtcaaaaaagattttgtatggaataactgtgagtttaaaaagggcacatcggtgctgcttgatttatatggaacgaaccacgaccctcgtctatgggatcatcccgatgaattccggccggaacgatttgcggagcgggaagaaaatccgtttgatatgattcctcaaggcggggggcacgccgagaaaggccaccgctgtccaggggaaggcattacaattgaagtcatgaaagcgagcctggatttcctcgtccatcagattgaatacgatgttccggaacaatcactgcattacagtctcgccagaatgccgtcattgcctgaaagcggcttcgtaatgagcggaatcagacgaaaaagttaaattaaaaagctctcttcctttatcgaagagagctttttgattacttctttttttcatcgtagtattggacgggatacatggagccttctgataccattttgttgtcctcgatatcttgcgggtccgggtggccggctttatcaactgggaacgtttccatgtctggctgttttgttattttcatcttcatgctgtgaatgaattctcttgccttttggcgatttgacgggtcttttaatagataagaagtgatgccgacagttgaaacagcgagacctgaaagtaacagcttttgtttcatggtgatactcctttctattttaagaatagtgtttcctgtatcattcccgttttggaaatagctaaacctattgtgtttttatcgtttggattaacagtaaattccatttaagaagaaactagtgacttcattcctgtattggaaggtaatatacattgacttattatcgtttcagtcaaaattcgataaatattgacaaagtaaagtaatcagaataataatataattagtaagagaatgtcatcatacatgaaaggtgtttacgatatgaatcaattgcatcgaagaatgggaacgttttccctcatgatggtcgggctcgggtcgatgatcggttcaggctggctgttcggggcttggcgtgcggctcaaatagcaggaccagctgctattatttcatgggttattggaatggtcgtcattttatttattgctctttcttatagtgaactaggttctatgttccctgaagcggggggaatggtaaaatatacgcaatattcacacggttcgtttatcggttttattgcgggttgggccaactggattgcgattgtgtccgtcattccggttgaagcggtggcctccgttcaatatatgagttcttggccatgggaatgggcgaaatggacaagcggtttggtgaagaatggaacgctgactggggaaggactagcgtttgcctctgtattgcttctcatttattttctgctgaactattggacagtcaatctattttcgaaagcgaattcattaattacgatttttaaaattattattccgggtcttacgattggagctttgctgtttgtcggattccacggagaaaactttactggcggtcaaagcattgcgccgaatggctgggcaagtgtgctgacggcggttgccacttccggtatcgtttttgcgtttaacggtttccaaagcccgattaatatggcgggtgaagcaaaaaatccggggaaatcaattccgattgcggttgtcggctctcttttcgttgcgacagtgatttatgtcctgctgcagatcgccttcatcggagcggtgaatccttctgatattgctcacggctggagccatttgaattttaattctccttttgctgatctggcgattgcgctgaatattaactggctagttattgtgttatatgcggatgcatttgtatcaccgtctggaacagggattacgtatacggcgacaacgtcccgaatgatttacggaatggaaaaaaacaaatacatgccgagtatattcgggaagcttcatccgatttacggcgttccgcgacaagcaatgttctttaacttgattgtgtcgttcatctttttgttcctgttcagagggtggggcgtattagcggaaattatttccgttgctacgttaatttcttatatcaccggcccgatcacagttatgacattgagacggacggggaaagacctgtacaggcctcttcgtttaaaaggcttaaacgtgattgcgccgcttggatttatctttgcgtcactggtgctgtattgggcgcgctggccgttaacagggcaggttctgtttattatcctgatcggtcttccgatttatttctattatcaggcgaaggcgaaatggaaagggtttggccggaactttaaagccggcgtctggatggtgttttatctgctggccatgatggtcatttcttatttgggcagtgataaattcggcggcctgaatgtcattcattatggctgggatatggttctgattgcgatggtatcacttgtattctatgtgtgggcgctgaagagcggctaccagacagaatacttaaaggatgcgaaagagataaattctcagctgcttaatggacagtcagaagctgctgccggaaaagaataaaataaataagaaaaccttgcgatagttgtcgcaaggttttttgcttttaataacccttttttactttgtggaaaagatcaggatagttggtgaacactcctgttacgccccaatcaagcaggcgatgcatatcagcttcattattgactgtgtaaggatgaagcaggaggccgtggctgcggatcatacggacgttttcttgatttaaagctttataatccgggcccgcaccgacagcgtatgttttgatttcttccagggcagcatctgtcattgacgccatttgtttggcttccagcaattgaacggtcggcaggtttggctgtaattgatggatttttaccaggctttctttgctgaacgattgaatgatcacctggcctggcttagaatgcttccccagtaatttatgtttctgcaaagaagcgatcagtttttcttccatacctgggtaggtgtcaggcgattttgtttcaatatagtagttcgcgtgctttccgaaacggtctaatacctcttctaatgtaggaactttaaggccgacgtactgcggctttgctttttccggataggcttcattaaaccaagaaccggcgtcaagcttcttaatgtctgcgagcgtatggtctttcacccagcccgttccggttgtggtgcggtccagtttttcgtcatgcatgacaatcaatttcccgtcttttgtcatttgcagatccaattcaatataatcagccttcattttctgagcggtttcgtaagacagaatcgtgtgctcaggcacatatccagaagcccctctgtgcgcgacggtcaggatacggtcaggtgacagcaggtttccttttgacgctgccgacactggcgttaccataaatgagagtaagcccagcgacagaacaaacaaggccagtattctattttttctcatgatttctcctccttatagataagcactacctgtctttcatattaaaaaacggatgtaaacggcgtgttggaaaactattaatcttttatgtgtctttcttaaacatgctctgcccgttttcctgtattccacgtcaaagccaagaagacgatggcaagaatacaggatgagatcagcatgataaagccgccgttccagttaaaacggtccacgacaaagcccataatggcgtttgcgaaggcggatccgccgatgtatccgaaaaatccggtcaaaccggctgcagttccggctgcttttttcggtgctagatcgatcgcttgcaggccgatcagcataacaggtccgtagattaagaagccaatgctgatcagggcgatattgtctacgagcggattgccggccggattcagccagtacaccaatacggcaatgaaaacacccgccataaacaaaacgcctgccggtgcccggcggcttttgaagaatcggtcactgatccagccgcacaagatcgttcccggtatgcctgcgtattcgtaaagaaaatacgaccagcgtgagtcttcaggagaaaagcctttggcttctgttaagtaagtaggcgcccagtcaaccacgccgtatcgcacgaaataaacaaatacattggcaaaagcgatgtaccaaagaaatttgttgttcagcacatattgaaaaagaatttcttttgttgttaattctttttcctgatttttaaaagcgtgttttggatagtcattccgatactcttcaattggcgggagtccgcaggattgaggcgtatcacgaaccaataaaacaattaaaaatgaaatgataatggcgatgatggcagggaagaaaaacacgcttttccaagtgacgaacatcgcgatcccaagagtcacaagcggagcaagaataccgccccctatgttatgggcgacattccagatcgacatttttgtgccgcgttcacttatggagaaccaatgggccatcgtcctgccgcatggcggccagcccattccttgaaaccatccgttgataaacataaaaataaacatgatggtgacgctcgaagtcacccaaggcattgaaacgaatagaatattaacgattgctgataaaaataggcctgtcgccagaaaatatctcggattacagcggtcagacaccattcccatgatgaatttgctgaagccgtacgcaatggacacagcggccagcaccaaacccagttctgttttcgaaaatccctgttcctgcagataaggaatggcaaaggcaaagtttttccgcagcaggtagtagcctgcgtagccaatgaaaataccaatgaatacttgcagtctgagccgtttgtatgccgcatccatctttgaatcatccagtctctcaatatgaggagccggtttaaatatattaagcattaaaattatccccctttgctgtttgtgctggatgtgtggcgtgcctcctttcccgaaaaacaaaaagagccagaaaacaccccttgtcaaaaggggttggattcctggctctcctcatctccatccaagctattaacttatcatgatagcgctttcttaaattatcatagtccggagcgaatgtaaacgggtaattttcaaattgggccttagggaagtaaatattatccttttactaaatgcagttatgtttttttactagtaacataaaaatctggagggaggctgtttaaaggtggatgaattagatatcgcattctttattttaccgttaggaattatgctgctatcgattgtcgggacctgtatttgtaaaaatccgtatctgatgccaatgcttagtttggtgatttctcttgtgctcacctttaccatttttattgaatcatttttgggatgggctgttgtctatagcttggtttctctggctttatcctatatcacattgattgtggtaaggaaaaggaaggaatcaggaaattaaaaagacctcactttctaacatatcgttgactaaggcaactatatgtgattataattggcttagtcaacaatattagaaagtggggattgatttgaaaacaagagaatcatctgtcggattaaaattcagaaagttcaatcgattttatacaaacgtccttggtttccttaatgagcacatttacgacagcccgttttccttaacagaaacacggattttatttgagatttataatacgcctaattgtacggcaaaagctcttcaggataagctggggcttgaccggggatatgtcagcaggattgtgaagcagtttgaaaaagaagatttgatctataaacagaggagcaaagatgacgcccgccaccattatatttttgtcacagaaacaggaaaaacgatttataaaaagctggaggagaaagccaacgaacaagtagaactgatgctgaatgaaatcaaccaaaaggagcagcacaagcttgccgaggcgatggcagagattgaagcgatcctttcacagtcgctttctgccagatcatcagagatatcgattagagattattttctctcggaggatcttcaactccttattgagaaacaaagacaattttacgcggaggctcacggttgggatgacacgtttttagcttatcttcaggagacatttgacgctgaaatcgaaaaaatatggattgcggaaagcggcgggaaatttgccggctctgtcgggttggtcaagcatgatgaaaagacagttcagctcagatggtttctggttgattcggattttcggggcagggggctcggcacgcaattgctggagcatctggttgcatactgccaagacatgaagtttgaccgcattttcctttggacggtgagtaccatggctgaggctcgtccgctctatgaaaaatttggattcaagataagtgaagtgaaacaagaagcgccattatggggacagcagctgacagaagaacggtgggatttggagctgtcatgaaaagactgcattatgcttgggtcatcgtctccgtcaccttcttgatcttattggcggttcagggggtgcggctgtcatttggtgcgtttgtggagccgtgggaacggcagttttcaatggatagaagcaccatctcgctgatttcgacgatgagttttattgtttatggcatatcacagcctgtgattgggcggcttgtggacaaatggggtgctcgggctgttttggcatggagtgcgttactgacaggagtcagcattttcttaacataccttgtgacttcgccttgggagctgtttttgctttacgggctgggtgtctcgcttggagttggcggagcatcgaatgtggcggcaagtgtattggtcgtcaattggttcagcaaaaatcggggactagcctttgggatcatggaagcaggctttggcgcggggcaaatgcttctcgttcccggctcactcatgttgatccattggtttagctggaagctgacggttgtggtgttgggactgctgttaatcgtgattgtctttccggctgcgctgctgatgctgcggaacaatccttcagaaaagaatacagagccgataggcggactggctgcatcagaaaaagaaacagcacccaaaacaacagctctttcagtggccgggatgtttcgtatgaggcaattctggttcttgatttttccgtttttgatctgtggttttacgaccgtggggctgatggatacccatttgattccgttttctcatgatcatggcttttcaacgacagtcacgagtgctgctgtcagtctgctggcaggctttaatattgctggcatcttgctgtccggaattgtagcggatcggtggagcagccggaaaatcctgtgctttttatatgcggtgcgggcgctgtcgatcgtgattcttatttacagccacgagccctacttgcttttaacctttgcgattctgtttggattagtggattttgcaacggtagcaccgactcaaatgctcgccacccagtactttcaaaactactcgatcggcctcatgattggctggctgtcactcgcccatcagatcggatcggcactaggtgcgtatgtgcccggcgtcatctatacggtaacgggtgagtatacactggctttttatttgtcgattggaatgctcgtgcttgcgagcgtaatgaatgtgatgctgagggagcctgcggcggtcacgcgtgacagtgcgtctgtggtagacaagtgatgaggacaaagggaaagcatctctgatttcgagattattcagagatgctttttttgtatttttgttctaatacgaagtcgatcataccgactatgcgggcgttttcggatttttgtttgaagcgttctgaaatttgaacttttcttgaaaatgggtaaacaccaaatacccatattaggccaattaacacaaaaaacatttgtacacccatttctattaaatcattataatgagaactgaaaaaataaatatataacgttattaatgttactgtaaatacgattttgacagtgtgtttgaatgtgagctgtggttcaattaaacacaatttcatttggttaagtgtgaaagagtcttgtttcattaggtacgaaagtaaatcattatcgttttgactgatagggtacaagtcagtttctattttttttgtgatctcctgatatttatgtatattacttttcatacagtatccccccttttttaagaagaactccatgaatccctacaggactcatggagaaacaatattatttaaaaagtgctaaaaatgtacggaagagtactgcagcagctcccatttcaggacctaccgttaatactaatgcaccaataccagcaacaattaagatacctgtacctaccacaagcatgttgttgacaatagtatcccaatctggtgagtatacttcctcagtatctggtaaagtaaagtgcttctgttttattttaaacgtaatcgtagtcgttagtccagttgtgatattgtcaccgactggaatatcaggtgtatagattttaatttgaatatttaaagattcagctgttggatttacataaacctccaaataaccgttgcgtactgataagctgagactatttaaaaggttttgataagagtcgatttgtgacgcagtaagagacgtttgagtgtcgcccaataaacccgtgatataggcacctggtttaccatttgtaatggtaattgtgtttggtgaaccttcacttggtatggttgccaaaagtgaagttgatagaataatatccaattcaggtgatgtgaaaatggtttctgtcgtatcaaattcaaacatcgcgtttgccaaacttgttagattttctaaagccggaatggtagataaaatgtctgtcagtgtacgcagccttgcatcatataccggatcagacggcggatttacattgcttgcacctgagtctcttcctgaaaatccgtctttatcaattccgatgcttccagaaccgcttccgatggttccttcataaaattgatcaaaggcccagttgtttggcataggatagccgagattgccgctaaatcctgttgacatatttgccacaaaactatactttgtcagttctgcttctgatgtacggatacaaatgtttcttggtccgtaaacccctatttcatacttaggtgcggttgaaaatgtctgcatttttgtaaatgctgacttaatctcttggaaataaggaatgattttatcggtcacttcataatcgtatgcatcaaaatcgacagcgaaataaatggtcgtgcctgacggaaaacctaatcttctagcaacagaagcggcactatatgcatctcttgtgccttggtctttgacaaaataagaagattcatagccgccgtcttgataaattgggaaaaccttcaatccggcatcaagaataactgcaagctctttagatgtcagggcttttgatgtgaggccgctgcttgtccgcacatttccggtcaaatatctgccaaccgttttataaccgttattccgcagtgtttgagctttttctgcggttataattgtagcagtgtcacaagcagaagcggcgcgagttgtgtctcctgagcttgataataaagctttaatggttggcatatctgcataacctgtttgcggcaggcacatgaactcttgaaatgctttaacagctgaaacaacacccacaccatatttgccgtcaaactcaccaggatcgaacgattttccgttacaatagagggcgtactgaacaattaagacaaatcctgttcttgaatcgccgggagttaaagtaggacacaaacttgtggtgccgtttccgaaaaatccattggcaacacttgtgctcatgccttcttctttttgcagggcataaataagagctttatttgtatcgcggccatacagtccgtcacaaggcattaacccgatatagtcattgtagtcccgatttaagttttgttgaatctggcgaattcttgaatcacccccagacaccagcttaaaagcgctcatgtctaataaggctttcataattaacgtggtgacaatcccatcctgtgttgtcagtccggcagctttttgaaattcttttaccgcattttctgttttttcgtaaaagacgcctgtaaaaccgccgggattaaagcctttacaccataaagccccttgtaaaataaaattcatgttgcttggttttgaatctggagcttggcgtttaagaggcttaaataagcgctgtgttgtcggcccgaagttatcggctggctctgagatacccaattcaatttgaagcgcccgagtcagaccgtagatcgtatcccacccagttttcccgctttcttcaactgggttatacccatgtttgccgctgtacgtatcgttcagccattgctgtgtgattaagaccatttcatcaaccatttcgattcctcctttgttagattgcgttcatttataggtggcaaacgtaggacaaaataaaaaaatggatgccgttaagcatccattttacatccgttctccaacagcttcgctttcggtttcagctctgaaatgtagaggcctaaaagtgtaagcgcgcctcctagaagagcgatccatgtcatgttttcgtgcagaatcaggacagaagcggcgatcgtgataaccgggaccatgtaaatatacgcactggatttgacggctccgagcacgccaactgaataattccaagtggcgaagcacagggcagaagcgccaattcctaagaaaagcatgttgagtatatttgaagcagatgaaaatcggcttaggtcaaaatggaagtcgaacaaaaataaagcgggaaccataaataataggccatacaaaaatactctctgtgtcaactcgatgatgtggtattcgtaagcgcttaattttttcatgaatatcgagtatccgccaaacacgagagcagccccggctgccatgatgtctccgagtggatttagacgcagtactacattgccgttaaacgtaatcaataaaagcccgatcagtgccgagacaaatccaatcaaaaaagtcagacgcagtttttcgccttcgagcagaaaatgggccaaaaccgcagtgatcatcggtataatggacacgatcatgccgacattggaggcgtatgtataggtgagagctatattttctaatagaaagtataaggttacgccaaataaaccagccccggcaaacaacagctcctgccgccaatttctgaacggaatcatgttggggcggacgaggataagagcgataaagcccatcaaaaaccgataaaataatatttccattggagagaagtcagccagcagaacttttgtcgaaataaaggtcgtcccccaaatcagaatggtcacaatggctgcgatatgccccgaagtttctctttgtatgttcatctgtgaagctccttttcaaaaatcttcatgtattgcttcggcgtcagccccacctgccgtttaaaaaacttcgtcatatggctctgatcgctgaatcctgtctgaaatgccgcatcaatcggccttaccccttgttcaagaagttttttggcttgattaatccggattgtttccatgtagctattaggagtaatgcctttttgttttgtaaatgaacgcaataaatgatacttgctccagcctgttaattcactcaaatcattgagtgtaacattttcggcataatgctcttctaaaaattcacaaaccattttgacttcgtctgatggttctggaacgctgctaaggaacgtgacatctgaataatggcggatcagctcttctaatagatgaagaaacagctcctccttacgcaaagcttgtttttcctcggatatcaaaatatgcaattcctgcaggctggctgtcagctcatggcggaataacacatgctgggagaaataagggagatgcccggcgccagtaatctctttcaccgccttctccatgatatccggcatgacattgatacaccgataatcaagcgtccggccgtcaatctgttcacagctatgcgtgtcacgggggttaaagaggagaagatcacctggattgatgatatattcttgatcctggcaggccagataccgttgccctttttcaataaatccaatcacataataatcgtgaaagtggttcgggaacttttgcataattcccttgaagcggtaggcttctatatgaaggtgtgggtcaagctgcagtgtgcgggtttcgttttgcatgggatgcctcctgtcggtgtggtggtcttggattaagtgtagcatgattttgggggatttcttgtatgatgttgctgtttaggaatagagaaagcagaccgttatttgtctgctttcgtttaagaatttaaaagattttaaccctcaataataattttatcttttttaataaaaatttatttttcaaatatttcagttataatggtttggaacagataggaggggcaaagatgtatcaatcaaagaaggttttattgttaggttcaggtgaattaggtaaagaggtagtgattgaagcccagcgtcttggggtacagacggtggcagttgacagttacgagcatgctccggcgatgcaggtcgcgcataacagttatgtcgttgatatgctggacccagagcagatcagaaccatcattgagaaagaaaatccggatttgattgtgcctgaggttgaggcgattgcgacggatgaattgctgaagcttgaagaggaaggatttcacgttatcccgaatgcccgtgcggccaagctgacgatggatcgggaaggcatcagacgacttgcggcggaaacgcttggacttgcgacagctggctatgaatttgcgaatacatatgatgaatttatacaagcggcagctcagatcggttttccttgtgtcgttaaaccattgatgagttcttctggaaaaggccaaagtgtgtgccgctctgaagcggatttagagagctgctgggagacggcgatggaaggcggacgggtgaaaaacggccgcgtgatcgttgaggagtttatccctttcgaatcagaaatcacactcttaaccgtacgtgcggttaacggtacggcattttgtgagccgatcggtcatgtgcaaaaggacggggattatatcgaatcgtggcagccgcatgatatgacagagcagcaaatagaagaagcgaagcatattgcgaaaacgatcacggatgagcttggcggatacggcctgtttggtgttgagctgttccttgcgaaagatagggtatatttcagtgaggtatctcctcgtccgcatgatacgggtcttgtcacgctggtgacgcaaaatttgtcagaatttgcgctgcatgtccgggcgattctcggctttccgattacagaaatcacacagctttctcctggcgccagcaggcccctcaaagcgccggaagaattagcggattacactgttgaaggattggaaaacgcactggcagtcccaaagactcaagtgcgcgtctttggaaagccgataacaaaagccggacgtcgtatggcagttgcgctttctgctgctgattcagttgaaacggcaagagagaatgcaaagaaagcgttggaccagctaattttaaaatagagtttgaacaggtcttgtcatgggacaaggcctgtttttttctttctccgtaaaagttttatcataagaatcagaaacctgattataatgtaaaagtcttccatcgatacgggtggttgacactaaaggagggagatgacaaaatgaaattagttccaagattcagaaaacaatggttcgcttacttaacggttttgtgtttggctttggcagcagcggtatcttttggcgtaccggcaaaagcggcagagaacccgcaaacttctgtatcgaataccggtaaagaagctgatgctacgaaaaaccaaacgtcaaaagcagatcaggtttccgccccttatgagggaaccggaaaaacaagtaaatcgttatacggcggccaaacggaactggaaaaaaacattcaaaccttacagccttcgagcattatcggaactgatgaacgcaccagaatctccagcacgacatcttttccatatagagcaaccgttcaactgtcaatcaagtatcccaacacttcaagcacttatggatgtaccggatttttagtcaatccaaatacagtcgtcacggctggacattgtgtgtacagccaggatcatggatgggcttcgacgataaccgccgcgccgggccgcaatggttcgtcatatccgtacggtacttattcaggcacgatgttttactccgtcaaaggatggacggaaagcaaagacaccaactatgattacggagctattaaattaaacggttctcctggaaacacggttggctggtacggctaccggactacaaacagcagcagtcccgtgggcctttcctcgtcagtgacaggattcccgtgtgacaaaacctttggcacgatgtggtctgatacaaagccgattcgctccgctgaaacgtataagctgacctatacaaccgatacgtacggctgccaaagcggctcgcctgtttatcgaaactacagtgatacagggcagacagctattgccattcacacgaacggaggatcgtcatataacttgggaacaagggtgacgaacgatgtattcaacaatattcaatattgggcaaatcaataaatacagcaaactagccatattcatgtctattttgtttttatgcgggtgcagttcgcagacgcattcttctcaaaaagaaacgactattcctgtcactcttcatgtggaggatgctaaggggctgccggtcgaaggggttcaagtgacgattgtcaaagcgccctcttcagatgaggagccgagtacagagattggcgagatactcggtaaaacagacaaaaacggagatatcaaatgggataccggcagaaaaggcgattactcagtcgcgttgacgaagggtgaaacatcagtaacccatcacatctcgttaacagaggataaaaaagatcatgccattccattagtcttcaaagaatagcagtttccttgattttaagggaactgccttttttatttattgcaggaaaccaaactatatactggaaatttattatgtgagataataagaaataggtattttttcttacgagacaaaaggggcgttatcctttatatcaatcaaacccggaggaaaaagaagaagatgatacaagattcaatgcagtttgccgcggttgaaagtggtctgcgcttttaccaggcatatgatcaaagcctttctttgtggccgattgagtcggaagcattctatgtttctactcgttttggaaaaacacatatcattgcaagtgggccaaaggacgcaccttcgctcattttgcttcacggaggccttttcagctctgcgatgtggtatccgaatatcgcagcgtggagcagtcaatttcgtacatatgcggtcgatataataggagacaaaaataaaagtataccatcagcagccatggaaacgagagctgattttgcagaatggatgaaagatgtctttgattctcttggacttgagacggcacatctggccggcctttcgcttggcgggtcccatatcgtgaatttcttactccgcgcgcctgaaagagtagagcgggcggttgttatcagtcccgctgaagcgtttatttcatttcatccggatgtctataaatacgctgcagagcttacaggggcaagaggagctgaatcatatatcaagtggatcacaggcgacagttatgatctgcatcctttactgcaaagacaaattgtggcgggcgtggaatggcaggatgagcaaaggagcctgaagccgacagaaaacggctttccgtacgtgttcacagaccaggaattgaaatcaatacaagtcccggtacttctgatgttcggtgagcacgaggctatgtaccatcagcaaatggcctttgagcgggcttcggtattggtgccgggaattcaggctgaaatcgtaaagaacgccggacatctgttatctctggagcagccagagtacgtcaatcaacgcgtcttgtcctttttatgcgggggataaaatagtaaggaacatgaaaagattggcattcatttttcaaaaggtaacaaatgttgtataataatagaatttgaatgctgctttttttgggagcattctatgttatcatgcttattggagaaaaatttttcctgtaacgctattcgatcactatcgtcaaataatatagatggttttacaattggaggtttggttacactgtgaattacatcccctgtatgattacgataggaaacttcatttgcggattgctggcgattcattccttgctatatcacaacattcattcagcagtgctttttatttttacaggcatgttccttgatttctttgacgggatggctgctcgtaagctgaatgccgtttctgatatggggagagaactggattcgtttgccgatctggttacgtttggggtggctccttctatgcttgcttacagtgtcgcgttgtataccctgccatttatcgggatcttatgcgcattgacgtacagcatttgcggaatgcttcgcctctctaaatttaacattgaacaaagcaagctcccgacgtttatcggtatgccgattccgtttgcgggcatgtgtctcgttattttaagcttcacctataacccgatccttctggcaatcggcacttgcggactctcatatttgatggtgagtaaaataaaattccctcattttaaaaaacatgcggcagaaaacctggagtctgggagatggaattagttcagcagctcatagcggattacggttatctcgctatttttttgatgctggtattaggaattgtaggattgccgattccagatgaagtgatgatgaccgttgttggctatttcacgcataccgatgtattgaattatgagctttcgatattgattagttttgtcggggctttgttaggtatgctgatcagctacatgattggcagaaaagccggacgcccgtttattgacaagtacggcaagtgggtcggcttaaaagaaaaaagaatgatgaaagtggaaaaatggatgaagaaatacggtccatattctcttattttaggttattttattcccggcgtcagacatgtgacgtgctacttttcggggatcggcaaaatggatctgaaaacgtatgttgcgtttgctgcaatcggcgcctttttatggtgctttgtttttattacaatcggaagggttatagggattattcatgtttaatacggctgtaaagattctgtatcgatcattgatagagctgacgaatcatcgtttgtcatcctatctgattaaaggattttgcgagtcgaaaatcagcaaaccggtcattccgcttttctcaaaacattttcggctgaattgggatgatgtggacggtacggctgctgattacggatcgctgtccgaattgttcattcgacaaataaatctggagcggcgccctgtgtcaaaagaggcgcatgcggtggtcagccctgttgacggtgtggttcagacggtaggaatcatcaacccgaatcaaacctttacggtgaagggaaaagattactcattcgctgagctgaccggctgtaaaagcgcagaccatcaatacaatggcggttacttcgtcgtgctgtatctaagcccgaggcattatcaccgtttccattctccgatcagctgcaggtatcaaaagctggccgagcttggaaatcgctcatacccggtaaatcaactaggcttaaaatacgggaaagatgtgctgtcgaaaaattaccggtttgtgtacgagctgaatagcggcagccgaaatctcctgatgattcctgtcggcgcgatgaatattaattctatcgtgcagacgaatacccgtactgaattggagatcggcgaagagctgggatacttttcatttggctcaacggtcattttgatttttgaaaaagacgcgttccagccgtccgcccatttagcagaaggccaagaagttcaagtcggagaactgataggttatgaagagtaaaaagaggagcttgcataaacgcagcgcctctttttttgaagaaaggtgagacttatggagaaacaaatcatcagctggattacagattatcagaacaccggagatgaagccgtcctgcggcaagtgcgagaagtgtgctggccgatcgttgaagcggttttgcatgagaaggcaatagatgatgaacaagcgaacaatttacgcgacaaaggaatcgagcggtttccattcatcatcagcaaataccaagcggatgtgcagcttccggttgagacatttttacgaaatacgtatcggttttactttcatcaggtgatgagagaatccagctaaagcttctttcaacagagaagcttttttttgttggcaggaaaaggaaactttttctatatctatctcgtaatgactagagaacctagcagaaaaggagagatagaattgaaacgaatgatagtgagaatgatcctgctgctgctgattgtctgtctggcgttttcttctttttcagtctcggcacgtgctgcttctgaagaaaaacattgggagcgctggattgaacgacatgcacagccactggatgcttccaatgcttcaaacaaagaccttcactttctgaagaaggtgctgaaaggaaaacgaatcgttcagttaggagaaacgacacatggcgctggcgaaatcaatgccacaaaggtcagaatgatcaaatacctccacgaagagctgggatacgatgtattggcctttgagtctggcttccctgatacaaatgcatcctaccttaatatggaccaattaacccctaaaagcacgatgaaaaactccatttacgctgtatggcacacagaagatgtcgttgaattgtttgattacatgaaagagcaaaaagagaaaggcgatccgctgatccttaccggttttgatattcaaagcatgaagaattcattcaatgatgctgcgactcattgggtaaaagcggtggaccctgagaaagcagagttgctctcccaatcagaaaatgatttttcaacattagtgacagacagcaatacgtttgatgaattttcgcaaaagaaggaaaagcttgtgaaaaactatcagaagctgatcaagttcactaaaacacatgcttcagagctaaaagaaaaccttccaaaagagccgaaagcttatgagatgtttatgcattctcttcagctgagaattgacgtaatggaaacgtatatgctggaagaaatgaaagaaaaactagaggagtatccggagaatattgaggatttttcattctttatgagagaccgcatgatggctgaacaatttcagtgggtagctgacaccctttatccgaaaaagaaaatcattgtctggggccacaattaccatctacgcaaacagaatacgaagatgataaaggactgggtacagctaaatggccctaacatgggtgattatttgccggagcggctgaaaaaacaaacatatacgattggcatttatgcttactcaggtgcgagtcttgatagctccgataataagactgttaagccggttacaagcccgccgccgtctgggagccttgaagctttgctgaaagcggcggaccgaccggctgtttttgttgattttctccatacaaaaaacaagaaaggcacttcgtggatgtataccccccgcacagcactctattggggattcacagaagagcagctgatccttaaggaacaatatgacggtgtcatttggctggagcatatcacaccatctgtcattatcaagtgagcggtgtcccctgtggtaaacaggggatttttacatatcgcaaaaataatcaaaacatataatccgtgatccattattctaaaacagaaaggagattggagcgtgcaatgtattatgaaaaagctgtccagaaaacaatcaattggattgaatcacatttacatgagcaaatatcaaacgaggatattgttaacgtttcaagcttttcaaaattccattttcatcggatttttcaaaaagaagtcggcatgtcggttgcttcttatattcggttaagacgtcttgcgaatgcggcggcagctttgctttatacagatcatcgtattatcgatattgctttgtattatcagtttgaatctcaagaagcatttacgaggacgttcaaaaagatgtatcacatgccgccaggagcataccgaacatttatgaaacgctttacttcaaaaaaggaggaatcttacatggagaaaaaaatgaaaggctgggtattgagcgggagccatccgttccaattcgaaatggggattgaccgggaaaatgtacatcagggaaaagcttcagggtatttaaagtcaacgatggttcaggatatcggtgaatttgcgacgatgatgcagcaattcaaagcagatcgctatctaggaaaaaggcttcgtctatcaagttttatcaaaacaaagggggtgcagcattttgcctcactttggatgcgggttgacagtgctgctgatgatgttctccaatttgataatatgagcaacagacctattaccggaacaaccaattggaatcattatgctatcgttttagatgtcccagaaaatagcgctgtgatatcttttggcgttcaattatctgggccgggtcaggtgtggatggatcatgttgtttttgaagaggtagatgagagcgttccttcaacaaaccttgaaatgccgggagaacttttagatgaaccggtaaatttatcttttgaagaggaactacaaaaatagttttcagacaactatttttattagtgagttattggaaaatactatttgttattaataaacccttgtgctgcttaggtttgtaagagcttggatatttttatcagtctgggcggatctgttcatctttgcggcattttcctgtatgatatagtaagagtgtgcatagcaactaactataattgaacagggtgtttaaaacatggaaaaacaatacagagtattactttactataaatatgttccgattgaagatccagaggcgtttagagagcagcatttggctttttgtaaggagcttggtttgttaggccgtatccttgtttcttctgaaggaattaacggtacggtatcaggtacggttgaacagactgaaaaatatatggaaacaatgaaagctgatcctcgttttgcggacatggtatttaaaattgatgaagcagaaggccatgccttcaaaaaaatcttcgtccgccataaaaaagagcttgtaacgcttcgtcttgaagatgatgtcgatccgaacgaaacaacaggccagcatttgaagcctgcagaattttatgagaagatgcaggatccaaacacaattgtcatcgacgcgcgtaacgattacgagtatgaccttggccatttcagaggtgcggtccgtcctgacatcgaagccttccgcgaattacctgaatggatcgaagaacacaaagatatgcttgaaggcaaaaagattttaacgtactgtacaggcggcgtacgctgtgaaaagttctcaggatggctggtgaagcaaggctttgaagatgtagcacagcttgaaggcggaatcgtgacatacggaaaagatccagaggtgcaaggcaagctttgggacggccagtgctacgtatttgatgaaagaatcagcgtgcctgtcaaccgtgttgagcatgtgattgtcggtaaggactactttacaggagaaccgtgtgagcgttatgtgaactgcgcaaatccatcttgcaataaaaaaatgatatgcacaccggaaaatgagtataaatatatgcgcagctgcagccacgaatgccgcacgaacccaagaaacctgtatgtgaaagagcataatatgacagaagaagaagtaaacgcaagactggcagcgattgaaacagaagatcacgctgctgctgaataaaaaaagaacacctcgtattgaggtgttctttttttctatatgctttcagtttggctgtttgcggaaacccattctttttggcggaaggccttttcccattttgataccacgatacaggcgatcgcatgtcccggtacgttcacgcccgttctcgccatgtccatgacgcggtcaacacccgcgataatggcaacgccttcagccggcagtcctacagcattggcagtcgccagaagaactacaagcgatcctgagggtacagctgcaatgcctttactggtcatcacaagcacaagcatcatgagcagctgctgggacaatgtcatgtctacttgaaaggcctgtgcgagaaagatacaagaaactgataaatataagctggagccgtcacagttcaatgacaagccggagggaacgacaaatgataccactcgtttgggacagccgtatttctccattctatccatcagctgagggagaatggtttcagtgctggtggtggaaaatgcaattaaaaacagatcccatatcattttcaatacttcgaaatacttaatctgaaagatgagaccgacaagcggaaagaggacaaagaggatcaggaacaggccaaggaatacggtgccaaccagcttaaacatagggaggaggagttcaatgccgtattggcctacagaagctgccatcagggctaacacgccgataggagcagtgaccatgacgatttgtgtgagcttgaacataatctgagcggtagattcaaagaacttcatcactggttcagaagctttgccgataccagcggcggcgacaccaaataaaatggcgaagaaaataacggcaagcaaatcatttctggccatgacatcaataatgtttgtagggataatatccaggatcatttgcttgaaatcaacaactttgtctgtgtagccggaaagttcatggatatctttttttgccaaatgggagaggtcaagcccgacacctggttttaagacattcgctaataaaagtccaagccctaataccaacgttgtaatcacttcgaaccaaatgatcgtcttgatgccgagactgcccatttttttcatgcttccgcttcctgctgctccaatgacaatggtagaaaatacaatcggcacaacaatcattttaatcaggcggataaatccatctccgacaggcctcagtgccatcccgaaatcaggaaaaaagtggccgatcaccgcaccgacagccaaagcgattaaaatttgaaacgcgattaattttttcaaatgaatccccctttagaacgatagaatgtaggcatattcatatcattcgtgattcaaatgcaaacaccttttttcaagttattttattttgacagcgctttcattatgttggcgaaaaagtcccccgcagcagggggacttttttacttcatttgaatgtgctttagatcttcttcagaggtatttgtgaaaataaccggtgttatggctgaagcggcatgctgcttgatgtaattgagatcaaaggtgagaagcagttcgccttgtttgacggcttgtccgcttgtgacatgtgcttcaaagccttccccattcagtttgacggtatcgatgccgacatgaatcaggatttcagtgccgccggcgctcataaagccgatggcgtgttttgtcggaaaaatcgagacgatctcgccgtccgcaggtgcaacgacttttccttctgatggtataatcgcaaatccctcgcccatcattttttctgaaaagacttgatcaggcacatcccctaaagagactgtttctcctttaatcggataaaaaaaggtctcaccggaatcgggcttctgcggtttgtcagttaccgtgtccagcgtggcggcggtggcagggacgcctccggccatgattgttttgatgtcgtcttttaaggcatcggacttggttccgaatattgcctggaagttgttgttgacctccagcacgcctactgcaccaagccgttttaattcatcctttctgacttgacttggctgatgaacggtcacacgaagccttgtgatacacgcatccaggttagcgatattttgctgtccgcccaaggcctgcaacacgtgaaaggcaagttggtcttttgcaactggagctttctcctcattctgaccgtcttcatctgtctcacggccgggcgttttcaaattccatttcagaatcgcaaatcggaacaaataataataaatgaaagcaaacacgatcccgacaggaatgacaacccagccgtttgtagacagtccgtagttcaagacgtagtcaattccgccgcctgagaacgtatagccgtggcggacatggaataaatcacaaacgacaaagatgacgccggcaagaatagagttaatcaaatagagcacgggcgcaacgaacaagaaagaaaactcaaccggctctgtaattccggtcagcatagatgtgagcgccgcagaaatcatcacgccggagatcatttttttcttttccggacgcgcggtatggataatggcaagagcaactgccggcagacagaaaatcatgtaagggaaatcccccatcataaagcgcccggctgtcgggtctcccgcgaaaaaccttgtcaggtctccggttacggtgttgcctgttgatgggtctgtgtattctcccatcataaaatagaaaggcgtataaaaaatatgatgcaggccaaaaggaatcagcaaacgatagatcgttgcataaaagaacaggccgactgttgaatcggcaattaaactgctggctgcgttaattccgttttggattagcggccaaacgaatgagaaaatgacgccgatcaccaatgaactgacggaagtaataatcgggacaaagcgttttccagagaaaaatccaaggaccggatgcagctcgattgatgaaaatcgcttatataaataggcggcgagaagcccgataatgattcctccgaaaacccccatatcaatcaggtgctcggctccttcatacggaggctgaaggccgagtaattttcccatattgtcgagggtgacggttaaaattaagtatccgatgacagctgcaagtccggctacaccttctccgccggctaatccgatcgcgacccccacggcgaaaatcagcgggagattatcgaatacaacgccgcccgcatcctttataatagggatgttcagtaaatccttgtctccgaaacggagcaaaagacctgctgccggcaggacggcaaccggagtcatcaacgcgcggccaagctgctgcagaatttgaaatgcctttttaaacatgacagtctccttttattgtgttatgagaatgatgcactctttaatttttgagctgctttataatcggcgataacggttacatgattgtgtttttgaagaatagaggctggtacatctgtcgtgacaggacattcagccatcttttgaatagcgtctgctttttcctcgccgcttgctaaaagcacaatatgtttgctgaattccatgatggttttaatgcccattgaaatcgcgagtctcggaaccagcaccggatcgccgccgaagaatctggcatttgcctgtatcgtgctttccgagagcttcacaacacgtgtccggtcttcaaaatcagatcccggttcattaaaaccgatatggccattggcgccgatgccgagaatttggacatcaatgcctcccgcctggcggatgagatcctcgtatactttgcattccgcctcaagctgcgggttgtctccttgcgggatatgaatatgatcaggctgcatattgatatgctgaaatagatgctcatgcataaagtggttataactttgcggatgagatggagagagaccagcgtattcatccaaattaaatgtagtaacctttgaaaaatcaatttcgcctgcctgatagtctgaaatcaactgcttatacaagccgaccggtgtgcttcctgttgccaggccgagaacggtatctttcttagcttgtatttgttctttaataatggcagcgcttaacttacagagttcttcgtagtgctcggcgattagaatcttcatgtgacaccccctcaaagagatagacaagcaccatatttgttatgaccaatttatgatacttgtcattacgaatttagcaccgcccttatcaaactgtcaatattaatttctgaaaatttgttataaaagaaggatacaaatctttcatattgggatggcaaatggtattatggtctcaatgaaaaagaacggattgcatacagaatggggagaatgaaatgacagctttatattctgtgatcaagtttaaaatcattgagttgattaaatcgggcaaatatcaggcgaatgatcagctgccgacggagagtgagttttgcgaacaatatgatgtcagcagaacaactgtgagactggcccttcagcagctggagcttgagggatatattaaaagaattcaaggaaaagggacatttgtatcggcggcaaaaatacaaacgccgattccgcataagattacgagctttgcagaacaaatgagaggccttcgttctgaatcaaaagtgcttgagcttgtggtgattcctgccgatcactccattgccgagcttttgaaaatgaaagagaatgaacctgtcaacaagcttgtcagagtcagatacgccgagggggaacctttgcagtatcatacctcatatattccctggaaggcggcaccggggctggcgcaggaggaatgcaccggctcgctgtttgagttgttaaggacaaaatacaatattgaaatcagcaggggcacggaatcgatcgaaccgattttaaccgatgaaacgatcagcggccacttattaaccaatgtcggagcgcctgcgtttttatcagaatcccttacctatgataaaaatgaagaagtggtggaatatgcgcaaattattacccggggagaccgaacgaaattcaccgtagaacagtcatatcattcataaagcaatgtgttttaagaagggaatggtggttctatgtttttatttacgaatggaaaagtgctgtggggagcagtgattgctgcattcatcctttcaattgtattttacccttttctgccgacgcagatgccgattcattatgatgttgcgaacagtccggatctgacggttaacaagctggcggggactgtgatgctgcctgttttgatggtggtgtttgcatgggcgcggaagatcaattggcaatttgtattcgcagtgtatattttgctgatttgccacattgtcgtcctttgtttagcgctctaaatcaaacagccagaataaaactggctgttttctttaatttcagcttcatctgacaatgaatgtggtgtataatagctgatgatcctaaagaatattctgaaatttatcggtgtggagcggcgtatcatgaaaggaagggctgtatgttttttgcagctttaaaaagactgaatatttaaacaattatatgaaaggtgtgctgatcagattgaataagcttattgaacgagaaaaaactgtatattataaggaaaagcccgacccgtcttccttggggtttggacaatattttacagattatatgtttgtgatggactacgaagagggaattggatggcatcatccaagaattgcaccgtacgcaccgcttacgctcgatccgtcttcatctgtttttcattacggccaggctgtttttgaaggattaaaagcatacagaacagaggatggcagggtgctcctgttccgtccggatcaaaatatcaaacggctgaacagatcgtgtgagcgcatgagcatgccccctttagacgaagagctggtgcttgaggcattgacacaattagttgagctggagaaagattgggttccaaagaaaaaaggaacgtcactgtatattcgtccttttgtcattgccacagaaccgagtctcggtgtgaaggcatccaggagctatacatttatgatcgtgctttcgcctgtcggctcctattatggcgacgatcagctgaagccggttagaatctatgtcgaagatgagtatgtgcgggcggtcaacggtggagtcgggtttgcaaaaacggctggaaactatgcagccagtcttcaggcacagcggaaagcgaatgagctgggctatgaccaggtgttgtggctggacgccattgaaaagaaatatgtggaagaagtagggagcatgaacatctttttcgtcataaacggggaagctgtcacacctgctttaagcggaagcattttaagcggggtgacacgtgcgtctgcgattgaactgattcgaagctggggcattccggttcgtgaagagagaatatcgattgatgaggtgtatgcggcctctgcacgcggagaattgacagaggtcttcggcacaggcacggcagcagtcgttacgcctgtcggtgaactcaacattcatggaaaaacggtgattgtaggcgacgggcaaatcggggacctctcgaaaaagctgtatgaaacgataacagatattcagcttggcaaggtgaagggcccgtttaactggacagtggaagtgtgaaaatcgaaaaagaacctgcctgaaggcaggttctttttattttgaataagtcatatcagcagccggctcgcttttgcggttttttacataatatattgcatagcaaatggccataaatggaacgccgcaatagagtgcgattctttgattcggatcaaaggcaatgccaacaacggaagccaggcataacaggaacgcagcaatcggcacgaacggatacaaaggggttctgtatttcaaatcagtaaccttgtttcccgcttcgatataacgttttctgaacatgaattgagaagcagcgattcccatccacacgacaacgacggcaaaaccggaaatcgacacgagcacaacgtatacagtgtctggcgcaaatacgctggacagcaacgacagaatgccgccgatcatgctgaacaccagcgcgttaaaaggggttccttttgacgtcagctttgcaaatgtcggatgaagcgttttttcttttgataaagaccacagcatccgggaagaagcgtagagtccggaattagccgctgacaggatcgctgtcaggataacaaagttcatgatatcggctgcgtatggtacaccaactctgtcaaaaacagcgacaaacgggcttttgatgacacctgcatcttgaatcggaatcagccctgacagcacaaaaattgttccgacaaagaagagtgagagacgccagaccgttgttttaatcgcttttggtatcgtcttgtcagggtcaacgctttcaccggctgcgattccgattagttccgttcccgaaaaggcaaaattgacggacagcatcgtcatcaaaatcgggacaaatccatttggaaaaagcccgccttccgcggtgaagttggacagcatcggagcggcttctccgcctttgatcggaatgatgccgaacatggcagagccgcctaaaagaataaataatacaatggctaatactttgatgctggaaaaccaaaattctgattcagcgaaaaacttgaccgaaaatgcgttaagcaagaaaatgaacagcgcaaagacggcactccacatccaaaccgatgtatgggggaaccagcgctgcattaacaggccggctgctgtgaattctgatcccaatgccacggtccatgttagccagtacagccaagcaaccgtaaatccggtgcccggccctatgtatttggctgcataggtgtgaaaggcgccggtcacaggcatggcgactgacagctcaccgaggcatagcatgaccagatagacgatgccggccccgactaagtaggcgagtatcgttccggccgggcctgcttgctgaatggtataacctgagcttaaaaacagcccggttccgatgacacctcccaaggaaagcataaagaggtgccggcttttcatacttctctgaaagtttgtctcattcttgttgtgggcagagttcatctttttccaactttctataagcgatttatttcctcctaataaaaaatctcatgtcaggaagtgacacgagactccggcgaaccggctttaagttagaatatacaaactattccgataagtcaagttgtttttaaagagcgggcccaagccgcaatttcttgaatatcttcgggttttgtccggcagcagccgccaatcagtctcgcccctttttcatgccaggtgcgggcgctcgccccgtaagattctgcgtatgctgcgccgttccacgtttttgtttccggatcatattgctcacctgaattcgggtagacaatgatcggttttgacgtgttcttttttaactcctctatcaaggaagggatatgctgaagcggcgtgcagttgatgccgagtgctgcaatttggcggtgttcatcaagccacgatgcgcagtcagctgcaggtgctccgtcactgatatgcaagccgtctttagcactgaagctgatccacgcatacgtttcaggaaattccttcaacagctgaacaatcgctttggcttcagtcagacacggaatcgtttcgcatgccaaaacatcagctccggcttcaatcagcgccttcatccggggacgatgaaattcaatcagttcatcttctggtattgcgtagttgccgcgatattcagacccgtctgcaagataagcgccataagggcctacagaagccgcaatgatcggctttggccgattcaaacggttctcttcaagcgaccaaaattcatcgcgtgcttcagctgcgatgctgacggacaactcgatgagccggcgtgcttccgcttcgctcagcccgcgtgcggcaaagccttcaaatgtagactgatagctggcggtgattgcacaatcggcgcctgctgcgaaataatcagtatgaacttgtttaatcagctccggctcttccatcaggatttttgccgaccacagactgtcgttcaaatcacagcccttgcgttcaagctcggtcgccatggcgccgtctagcacaataagcgggtatgtatctagtatgtgttggataggattcatagaatgtacctttctttcagatttttttgaaaaagatatgaaaatcgtaatggaggcttacgtgtttgtcaataaacgcaaaaagagaaaggtgttcagcccatatgtctgaacacccttttcttatgatatttgtttgttgtgcgtgtcagtctttgtgtctgaaaccggccagcactcaatgccattatggtttttgagcacatctttataaaagacaggatctttgcctgcttttttctggcgtgtatagtctttcagcgccgtaaaaacaacctttgatagtaagaaaatagcgattaaattcacgacgaccatcaaacccatgaacaaatcagcaagatcccagacgagctggactttggcaacacagccaaacacgatcattgccagcacgccgatacggtagacaaaaatcagttttttgcttttgttcaaaaagccgatattggtttcgccataataatagtttccaattagagcacagaatccgaataacaaaatcagaatggccagaaagcctgatgcccatgatccgacatgggagctgagggaggcttgtgtcaaggcgattccgctcagacccggagtatgataggcatccgaaaacaggatgataaaggcggtgcttgtacaaatgaccagtgtatctgtcagtacaccaaaagcttggatcagcccctgtttgacgggatggcttgttgtggcggtggcagcggcattcggtgcgcttcccattcccgcttcgtttgaaaagattccccgtctgacgccttgcatgagtgccgcgcccaaagccccgccggcggcctgatcaaaaccaaacgcatttttcacgattagcgcaagcacacttggcagctgcgtaatgttggtgaaaatgacgaaaaacgcaactccgatatacaggacagccaatacgacgacaatggattcagccagctttgcaatgcgcttgactccgccaaaaataatcgtgccgaatacagcaattaaaatgagtcccaatgtcaggcggtttgtgccaaacgcgttttcaaaggcaaggctgactgtattggattgaaccgagttgaagacgataccgaacgataaggtgattaacacagcgaacagcgcgcccatccaccttttgttcagccctttttccatgtaatacgccggcccgccgcggaagccgtttacatcttttactttataaatctgagccagtgtgctttccacaaagctggatgctgatccgataatggcgataatccacatccagaagattgcaccgggcccgccgagtgcaatggcgatggcaatgcccgtaatatttcccgttccgacacgggccgccatgctgatgcaaaaggcttgaaacggagaaatgctgttttttgaccgggaagcagcaccttctcttaataccctgaccatttctttcagcatgcgaacctgtaaaaacttaagcctgaacgtaaaatagattcccagagaaaggagcaaaacaattaatagctttgaccacaaaagatcatttgcaataccgacgatatgttccaggatttgctgcatacaatcacctcttttttcatatttaaaaaatgctgagctcccattcctgcgccatatgcttcagcagcataccgccagtgaggctgttgccgtattcatcaatggcaggcccgtaaatgccgatgccgcatccggattgaaaaggctgttctcttctggcgcttggaggcaccagcgccatgatgccgccggagacgccgcttttggccggcacgccgacaaacgccgcatatttgcctgaagcgttgtacatgccgcacgtcagcattaatgccttggctaattttgccacatcttttggaatcacctgctcgcgtcgaatcggatgatacccgtcatgagcaaggatcaggccgatcaacgcaatatcttctgtggtgctctccatagcgcattgcttcaagtacacctcaagtgtttcttctacgtcagcttctaaaaagtttgtttcttttaaatagtaggccagcgctctgttgcggtgggcggtttcccattcagaacggaatacttcctcatgaattctcggccgttttcctatcaaagtttccatcaccgagtaaagaaactcgagcttttcgtatgccgattctccgggaaggatcgaagcgatggtgagggcacccgcgttgatcatgggattgaagggctttcccggcttgttgatttcgagccgaatgattgaattaaaggcgtcgcctgtcggctcgacatctacgcggtccagcacatagggaatgccgcggctcatgcaggcggcaataaagctaatcacttttgaaatgctttgcagggtaaaagagacgttccagtcgccggcgtgtatcatcgttccatcaggctccaatacacagatgccgagctgtgaatcattgacttttcctaaagcggggatatagtttgcgctttgtccattggcggcaaaagggcgatagtattcaacccaatcatgaagctgtaacgccggatttatgtctttctggtgctcttttatcaattctttcatcgaattcctcctcactgatttttttcttaaaggactgaggtgtatcaaaacgaaggctaaaggggcgttaaacgctttcataatagcggaaggtataattactgtataatggagactacagaatcatacaaaatacgacaaaaacattttgaaaataagcagtaagatttataaaaacctcatgttctgggtcaaaagcaatttgcaggttttctcccgattccccaaaataaaaagcgaggatgtgatcaacataaaactggaacggtttattgaaaaagacggatatatactggccctcatgctaattacggtgccgctggccggtgaactgaaattttatcccctcaatgaagaattccgggtcagctttggggcaccggtttttttcttctttttatcgttgttgcggcatgtgcccgctgtgctgccgggttttctgactggagcggctgttttcatctttcgcgtctttctggaattatggggcggaggacacaatgggctgactccgattctgtatgatcaagcgtctggctttttcttttatatgacttacgcctgtctgttttccatattaaaggccaatcgtttccgtgaacggccgattatgctcggtttcattgggtttatgattgaagttgtgtcagattgtgtcgagctggctgtgcaatttctcatttttcatacggttgttacgcctgagaaaatcactgacattgcggtgattgcgatttctcacacatttattgtgatgagcttttatagtgtgctgaagctgtatgaaacacaatcgagagaaaaacagacaaggcagcagcacgagcacatgctgatgatcgtttccaatttatatgaagaaacggtgcacctaaaaaagacattgaaaacgacagagaaagtgacaaacgattcgtatcagctctatcgggaaatgaagggcaaggatgttcagctgagcggcagaatcctgagactggccggagagattcatgaagtgaaaaaggacaaccagcggatattcgcagggctttcaaaactgatttcgaatgagagtttgagagattatatgagggcttctgatttgctgcagctcgtgattcgaatgaatgaaaagtacgctgaagcactagggaagcagattgatttttactgctcgatcgagggagagcatgacgaatatcacgtatttatcgtgctttcgatcattaataatctaacagcaaatgcggtagaggctatggatgaagagggaatggtcagcctgaggctccgtaagccaaatgagagtatggtagaattccaggtggaagacaatggccccgggatttccgagaaaatcggagacattgtgtttgacccgggctttacttcaaaatatgacgaatttggcacgccttctacgggtatcggactttcctacgtaaaggaaatcgtgactgagctagaaggggatatcacgtttgataatcagcagcggggagtggtgtttgccatcaggctgcctgtccggcatttgattcagaaagggtgaaccgaaagctatgcgtttttttattgcagatgatgaccgtgcagtgcggtcaattttaaggcagatcattgaggacgaagatctcggggaagctgttggtgaagctgacgacggaagccaagtggaagggcatatgctgcaatttaagcagattgatattttattaatcgatctgttaatgcccggaagagacggcattgagacgattcgtcagatccagaatacgtactccggcaaaatcataatgatctctcaagtggaggcgaaggaaatggtcggggaagcgtactcgctcggcatcgaatattttatccataagccgattaaccgcattgaaattgtcacggttctccaaaaggtgaaggagcggattgagcttgaacactcgattggagccattcagcattctctaagccggcttgtcaatcggactgaacggaaagcgcgtccccagcagaagagtgacagcggtttaaaagaggcaggaacattcctgttgtccgagctgggcatgatgggagaaggcggcgcacatgatctcatggcggtcctgcagtatttagcagaacacgagcaatccgagccgcacgaaaaacaaagcccttcgctaaaacaaatattcacccaagtagcgctacggaagctgggcacaggggcctcacagacggaagtcaatcgcgaaatgaaagcctcggagcagcgtatccgcagagcgattattcattcgctgcaccattttgcttcactgggcacaactgatttttcgaatccaaaatttgaaacctatgcatccaaattctttgattttccggttgtcagccagaaaatgaaagaactccaatccaaggatgcaaaaccccttgcacctgctagaataaatatgaaaaaattcatccacgtgttttttttggaagcaaagcttttgcatgagacgatgaaacaaagaaggatataaaccaaacagccggctgaccaggctgtttttttgctgcgcagaatcccggccggacagtgattcaccgcttttttataaaatatcagaaaataaagatattgacttattgtttatttgtcttacaattaaacaaaaggatatatggggaaggagcggatgtgaaagaaaaattaataaaagcgcttacagatagaggctgtatacacaaataacaggaggttatgttgatgagccgtatcagaaaagcacccgctggaattttaggttttccggttgctccttttaacacacaaggaaaactggaggaagaagctctttttcaaaacattgagtttttgctgaatgagggcttggaagcgatatttatcgcttgcgggtctggtgaattccaatctctcagccagaaggaatatgagcaaatggtggaagtcgcagtctcggcagccggaggaaaggtgccggtctacacgggggtgggcggcaacctcagcacagcgcttgattgggcgcagctgtcggagaaaaaaggcgccgacggctacttgattctgcctccgtatttggtgcatggcgaacaggaggggctgtaccagtatgcgaaaacgattattgaaagcactgacttgaacgcaattctttatcagcgcgataacgccgttctctctgttgaacagatcaaacgtctgaccgaatgtgaacagcttgtcggtgtcaaagacggggtaggaaatatggatttgaatatcaacctcgtctatacgatcggcgaccgcttaggatggctcaacggaatgccgatggctgaagtgacgatgccggcttatctgccgatcgggttccactcttactcttcagcgatttcaaattatatcccgcatatttcgcgaatgttctatgatgcattgaaaaacggaaatgacgagcttgtgaaggaactctatcggcatgtgattctgccgatcaacgacattcgcaaacaacgaaaaggctacgccgtatccttgattaaagccggtatggaaatcatgggtttgaatgtaaggaatacagccagaccgcctgtcggcccggttgaaaaagatcattatcagcaattggaagcaattttgaagcaggcggctgaccgttttccgaaaaaagccgcgacggtttgaccagaaaaaacacgaaaggggcaatgggcatgtctgtgatcacggaacaaaacacgtatctcaactttattaacggagagtgggttaagtctcaatcaggcgatatggtcaaggtcgaaaaccctgccgatgtgaatgacattgtcggatatgtacagaattcaacggctgaagatgtggaacgtgccgtcgccgccgccaatgaagccaaaacggcttggagaaagctgacgggtgccgaacgcggccaatacttatacaaaacagcggatatcatggagcagcgcttggaggaaatcgccgcctgtgcaacgcgtgaaatgggtaaaacattgccggaagcgaagggagaaacagcccgtgggattgccattctgcgctattacgccggagagggcatgcgaaaaacgggtgacgtcattccgtctactgacaaagccgcgctcatgtttaccacccgtgttccgctcggtgtggtcggcgtgatttctccgtggaacttcccagtggcgattccgatttggaaaatggcgccggcattggtatacggcaataccgttgtcatcaaaccggcgacagaaacagctgtgacatgcgcgaagatcattgcctgctttgaggaagcggggctcccggcaggggtcatcaatttggtgacaggcccgggttctgttgtcggtcaggggcttgctgagcatgacggtgtaaacgccgttacgtttaccggttcaaatcaagtcggaaaaatcatcgggcaagccgctttagcgaggggagccaagtaccagcttgagatgggcggcaaaaaccctgtcatcgtagctgatgacgctgaccttgaagctgcggccgaagctgtcataacgggggccttccgttcaaccggccagaaatgcaccgcgacaagccgtgtcattgtacaaagcggaatttatgagcgctttaaagaaaaactgctccagcgcacaaaagatattacaatcggagacagcttaaaagaggatgtctggatgggaccgattgccagcaagaatcagcttgataactgcctgtcatacattgagaaaggcaaacaggagggggcttcccttttaataggaggagaaaagctggagaacggaaagtatcaaaacggctattatgttcagcctgccatctttgacaatgtgacatctgagatgacaattgcccaggaggaaattttcggtccggtgatcgccttgatcaaggtggactcgatggaagaggcgctgaacatcgccaatgatgtgaagttcggattaagtgcatccatcttcacggaaaacatcggccgaatgctttctttcattgatgaaatcgatgccgggctggttcggatcaatgcagaaagcgcaggtgttgagctgcaggcgccttttggcggcatgaagcagtcgagctcccactcccgagaacagggtgaggcagcgaaggactttttcacagcgatcaaaaccgtttttgtgaagccgtaatggtgctggaaagaggcatgcgtctctttcccagctttatcacagccagcatatgattctctactttgaaaaggagaagatactatgaaaaaagactttgcgaatgttacaccggcgggcaaaaaaacgtccgtgcgctggttcatcgtgtttatgctgtttcttgtgacctctattaactacgcggatcgagcgacgctttccatcaccggagattccgtccagcatgatttgggattggactcggtcgccatgggatatgtcttttctgcctttggctgggcctatgtcatcggacagcttccgggcggctggctgctggaccgttttggttcaaagactatcattgcgttaagcatctttttctggtcgttttttacgctgctgcaaggggcgattggctttttctccgccggcacagcgattatcctgctgtttgcactgcgttttctggttggtttatcagaagcgccttcatttcccggaaacggcagagttgttgcctcatggtttccaagctccgagcgcgggacagcttcagccttttttaattcagcacaatacttcgcaatcgtcattttttctcctttaatgggctggcttacccactctttcggctggcattccgttttcgttgtcatgggtattgcaggcattcttctggctgtcatctggctaaaaacggtgtatgaaccgaaaaaacatccgaaggttaatgaagctgagcttgcgtacatcgaacagggcggcgggctgatttccatggatgacagtaaaagcaaacaagaaacagaatcgaaatggccgtatatcaaacagctgttaacgaaccgcatgctgattggcgtgtacatcgcgcaatactgtattacgactctcacctatttctttctcacatggtttccggtatatttggttcaggcccgcggcatgtctattcttgaagctgggtttgtcgcttccctgccggcgctgtgcggatttgccggcggcgtccttgggggcattgtgtcagacatcttactcaaaaaaggccgttcactgacctttgcaagaaaagtgccaatcattgccggcatgctgctgtcttgcagtatgattgtctgtaactacacagattcagcatggctcgtcgttgtcattatgtcgctcgcgtttttcggaaaaggcttcggcgcattgggttgggctgtcgtgtcggacacgtctccgaaagaatgtgcaggattaagcggcggtttgttcaacactttcggcaatattgcctcgattacaacaccgattattatcggatacattgttaatgccactggatcttttaatggcgcgcttgtgtttgtcggcgctaacgcgattgcggcgatcctcagctatttgctgctggtcgggccgatcaaacgggtcgtgttaaagaaacaagaacaagaccccgatcaatcgttgcctgtctaatatttatgaaagcgctttataaagggaggaaaatgcatgagttcaccgatacaagagcaggttcaaaaagagaaaagatcgaatattccctcaattactgaaatgaaggtgattcctgttgcgggacatgacagcatgctgctgaatctaagcggagcacacagcccgttttttacccggaatatcgtaatcttaacggacagcagcggaaatcagggagtcggcgaggtgcctggcggagagcatattcggcgcacactggagctgtcagagccgcttgttgtcggaaaatctatcggtgcgtaccaagcgatattgcaaacggtcagaaagcagtttggcgatcaggacaggggagggcgaggaaaccagacgtttgatttgcgcaccactgtgcacgccgtcaccgcactggaagcggctttgttagatttgcttggaaagtttcttcaggaaccggtcgcggctttactgggcgaagggaagcagcgtgatgaagtaaaaatgctcggttacctcttttacatcggcgaccgaaagcggacgaccttgccgtatcaaagcgatgagcagtcagattgtgcgtggttccgtctgcgccatgaggaagcgctgacgccggaggccattgtgcgtcttgccgaatccgcacaagagcgctatggctttcaggatttcaagttgaaaggcggggtgctgcggggagaagaggaaatcgaagctgttaccgcattatcgaaacgttttccagaggcaaggatcactcttgatccgaacggggcatggtcattagaggaagctattgcattatgcaaaggaaagcaagatgtgctcgcgtatgcggaagatccgtgcggggatgagaatggctactccgctcgtgaagtaatggctgaattccgccgcgcgacagggcttccgactgcgacaaatatgattgcgactgactggcgggaaatgggtcacgcgattcagctccatgcggtcgatataccgctggctgatccgcatttttggacgatgcaagggtcggtgcgggttgcgcaaatgtgcaatgattggggtttgacatggggctcgcactccaacaaccactttgatatttcccttgcgatgtttacccatgtggcagcagcggctccggggcggatcacggcgattgatacccattggatctggcaggacgggcagcaattaacgaaacagccttttgagatttcttctggctgtgtcaaggtgccggataagcctggactaggcgtcgatattgatatggaacaagtggaaaaagcgcatgagatctaccggaaaatgaatttaggcgcacggaatgacgcgatcccaatgcagttcctgatccgcaactgggaatttgaccggaagcgcccgtgtcttgtgcgataagtttgtttgtaaatattgtcatatccgctattttgtcttacaattgaacaactgaagggagagttgttcgtgtacgaaggtttagaggatttgaaagtcgatacagtcaatcggaaaacattagccaagcaggtcatcgaacggattgtccatttattatcgagcggacagttgagggctggagacaaattgccgacagaaatggaactgatggacattttgcatgtcagcaggccggtgctacgggaagcactcagttcacttgaaacgctgggcgtcattacgagaaaaacacgagggggcacatatttcaacgataaaatcggcatgcagccattttccgtcatgcttgctttggccactgataatcttccggctatcattgaagcgcggatggcgctagaactcggactcgtgacaattgccgcggaaaaaatcaatgaggaagagcttcagcgtttgcagaagacgatcgacgatattgccaacagcactgacaatcattatggtgaagcggataaagagttccatcgaattattgcgttaagcgccaataaccccgtcgttgaagggatgattcagtccctgctgattacccatgcgaaaattgacagccaaattccgtacagggagagagatgtaacggtcgaatatcacaaaaaaatctacgacgcccttgccaaaagagatccgtacaaagcacattaccacatgtatgaacatctgaaatttgtccgtgacaaaattctaaaaggaatggatgaaaaataatggtgagcaaccgcagttgaaacgtaagagctgcggtttttttaaaaccaatttagaaaacgcttactaagttatgaggagtgattttcatatggcgatgaacctcaggaagaaccaagcgcccctttacatcaaagtgcatgaaatagataacaccgcgattattgtaaatgatggaggactgccaaagggcactgttttctcatgcggactcgtacttgaagaggatgttcctcaaggccataaggtggccctcaccgatctcaatcaaggggacgagatcgtgcgttacggagaggtgatcggatttgctgatgagacgatcaaacgcgggagctggatacgggaagacctcgtgagaatgcccgctcctccggcgttagacgatcttcctctcgcaaacagggtgccgcagccgcggccccttcttgaaggctacacgtttgaaggataccgaaatgcggatggcagtgcggggacaaaaaatatcctcggtatcacgacaagtgttcaatgtgttgttggcgttttggattatgcagtcaaacgaataaaagaagagctgctgccgaaatacccaaatgtcgatgacgttgtgccgctgcatcatcaatacggatgcggcgtggcgatcaatgcgcccgacgctgtcattccgatccgcacgattcaaaatcttgcgaagcatccgaacttcggcggagaagtaatggtcatcggattgggatgtgaaaagctcctcccggaaagaattgcctccgaaaatgatgatgacattctatcgcttcaggatcaccgaggttttgcggcgatgatccaatccattttggaaatggcggaggaacggttaatcaggctgaacagcagaacccgggtgtcatgccctgtttcggatctggttatcggcctgcaatgcggcggcagtgatgcgttttccggcgtgacggcgaaccctgccgtggggtatgcggctgatttattggttcgcgcaggtgcaacggttttgttttctgaagtgacagaggtgcgggatgccattcatttattaacgccgcgggctgtcagtgaagaggtcggacaatcactgatcaaagagatgaagtggtatgacagctatcttcggcggggagacgcagaccgaagcgcaaacccgtcaccaggcaataaaaaaggcggattatccaatgtggtggaaaaagcgttaggctcggtagcgaaatcaggcacaagccccatctccggcgtgctcggccctggtgaaagagcagagcaaaaaggcctgctgttcgcggcgacaccggcaagcgattttgtgtgcggcaccctgcagctggctgcgggcatgaatctgcaggtgtttacgacaggaaggggaacaccatacggcctggctgctgcgccggtgctgaaagtatcgacgcggcattccttatcagaacattgggctgatttaatcgatatcaatgccggccaaatcgcgacaggagaggccagtatcgaagacgtaggctgggaaatcttcagaacgattttggatgtggcaagcggccgaaaacaaacgtgggcagaccgttggggccttcataatgatttgtgcttgtttaatcctgctccagtgacttgattcatttttttatagcgattagatggaatatgatgtaaaatacaattaacgtataggaaacggaggggttacagcatggcattcattagattccgagtgacacgaattcaatagtgagcaactctcgcctgaatgcgggagaatcgggatgaatccgcctatgtatgagcccttatatggttattaaaaaagagggtggcgatgcctgccttcttttttctgcctccaaacatcccctctctctccttcagggcggagcatgagaaaggggaaatgggatgacaaaccttaccgaaaaacagatgatcacggagattgtcgggcttgcacgcagccaaggtttgacggttcattctgaggacgcgcaattgaatgaaaccggaatggactttcaagttgtatttgccaaggacgacacaggtatgccatgggtgctgcgaaaaccgcggcgaagtgatgttgtggaaagagcatctgcagaaggcataacgcttgcctttctccgcgcgaatctgactgctgatgtgccggattggagaattcacacgccggaattgatcgcttacccaatgttaaaaggaacgccggcggccgggattgatttggaacaaaagcaatatgtttggaatatgaatcatcagccgccatcagacgattttgtccgtacacttgctggcatactggctgaattacatggcacggatcaaatatctgctgggcaatccggaatagaagtgataaggccagaagatttcaggcaaatgacagcagactctatggttgatgtgaagaataagcttggcgtatctacgacgctttgggaaagatggcaaaagtggatagatgatgatgcatactggccgggtttctcttctttgatacacggcgatctccacccgccgcatatccttatcgatcaaaatggacgtgtcacaggacttctggattggacagaagcgaaggttgctgacccagccaaggattttgttctttatcaaaccattttcggagaaaaagaaactgcccgtttgcttgaatactatgatcaagcaggcggccgaatatgggcaaaaatgcaggaacacatttcagagatgcaggcggcgtatccggtggaaatcgccaagctagctctgcaaacacagcaggaggaacacatcaatatggcgctggaagcacttggtgtaacatcggattaagaattgacttcgtttcatgaaccgagtattataaactctacaaataatagaacggattaacaatcgtgaggaagagcaagtacgcatcagaatggaggttcagagagtcggtggcaggtgtgaaccgatcctcccctgatgccgaatgggcttctgaattgctttgctgaacggatagtaggcgatgccgggtttctctccccgttaccaagagaggagtatcgaaacataggttttctgtacttagagtgaacggctgtatagctgttaataaaggtggtaccgcgagaccctcgtcctttgcataggacgggggttttttgtgtttcttaaaggaggtgacggccaatggacgatggctggtggtggcatagcagatgagttagaaaggaggatatcaaatggtcattgcaactgatgatcttgaggtcgcatgtcctaaatgtgaaagagcgggagaaatcgaaggaacaccttgcccggcctgcagcggaaaaggtgttattctgactgctcaaggatatacgcttctggattttatccaaaagcatttgaataagtaaaggagaaaagctgagctgagatgagagcagaagagcagagtaagattcgtgaggccgcagcaggtacgatttttttgctgatcggaacagtttgttttgcgtctaaatcgatttggataaaatgggcataccaaatgggtgctgagccagatgccgtgctgctatataggcagctgctggctgttccgctgttttggctgatttttttaatatatcgtcctccaatgccagacggtaagaaaaaaggagacctatggaaggcttgtggcgcgggagtgttttgtttttttctgtctcccttgcttgattttatcgggctgaaccatgtatccgcaatggttgaacgtatattgctgatgagctatccgttgtttgtgtttggattcaccgcgtgtcgtgaccggaaaatgtcctcaattcaggaccttttcgcagttctggcggtcatgtttgggcttttcttggcgctgggcggctggaatgctgagcttttccaggcgaatatgattggagctgtattcattttgttatcttcggccgtctatgctggttatcttgtcctttccgggcatctcgtccatcaaatcggggggatccgtctcaatgcatacgggatgacagctgctggagctgccatgatgctttacacagggatcaaatcggcggctggcatgaatacgccaatggcagcatatccgctttctatgtatggtttgttcgcggtaattgcagtcgttaccacagtgattccatttgtgctaatgcttgagggcataaaacgaatcggggcacagcgagccgccgccatttcaatggcagggcctatcctgacgattttctatggagctttatttctcggtgaacggctcgggctcattcaagtcattggatgcggtgccgtattttttgtcattacggtgatggaatacaggaagctgaaaacaggaaaataagaataatttatataaaacacacacgtttttcaattacaataagtgtaattacgtgtgtgttttttgattttgtaaaggttaggtgagaagatgcagcgcatattgcttgtagaagacgaccactcaatcagtgaaatggtggatcattatttaacaaaagaaggctttggaattgtgcatgctttcgacggagaagagggcatccggctgtttcagcagggttcatacgatttggtcctccttgatatcatgctcccgaagctgaacggcatggattttctgaaaatcatccgggaaaaaagcaatataccggtcttaatgatttcggcaaaagacggagatgtggacaaggcattgggactgggttttggggcggatgatatcgccaaaccgttttcgatgattgagctgacagccagagtaaaagccgcgatacggcgggcgacgcaatattcggcagaggagccggctgtgaataaggtgatccggattcaccagcttgcgatagatatagacaatgtttccgttttgaaaaacggagagccgctccagctgacgtcaacagaatggcagctgctgtgcttatttgcatcaaatcctaaaaaagtgtttacgaaagaacaaatctaccgttccgtttggaatgaagagtactttgatgatcagaacatcattaacgtacatatgcggcggctcagagaaaagattgaggatgacccctcctcccctcaatatattaaaacgctatggggcatcggttataaattaggagagttttagaatgacagtgctatgggtggccgctgtcatcgctctggcgtgtctgaatgtgattcaattcataatgaaaaagaagcgggacgggaatctggcttacacggctgaccagcttagctacatgctcagccgggattcggcaggacaaattttgcttcctacagacgatcatgcgctcaaaggcttgcttgttaacatcaatcttatcgttgagaatcgtcagcagatcagcgctcgatttgccaaaacagagcaatccatgaagcggatgctgaccaatatgtcgcacgacctgaaaacgccgttaacggtcattctcggttatatcgaagccattcaaagtgacccgaacatgccggacgaagagcgggaaagattgctggggaagctccgccagaaaacaaatgaactcattcagatgatcaactccttttttgatttagcgaaattagaatctgaagataaagagatcccgattaccaaagtacatatgaacgacatatgcaaacgaaatatcctgcactattatgacgctgttcagtcaaaaggctttcaagcagccatcgatataccggatacgccggtgtatgcgcaggcgaatgaagaggcactggacagaatcctacaaaacctattatccaatgcgattcaatatggcgcggttggcaagttaatcggcatgacgctgtcttatgatgagaggaacatcgccatcaccgtatgggatcgcggaaaagggattagtgaaaccgatcagcagcgggtgtttgagaggctgtacacacttgaagaatccagaaataaagcatttcaaggaagcggcctgggtttaaccatcacaaaacggcttacagaaaaaatgggaggcaccatatccgtccaaagcaagccgtacgaacggactgcatttacgatcacattgaaacgcatgacatattaatcgtaagaatttcttaaggtttgagaaataaaaatgacagggctcgccgctacaatagaaaacaggaaaagagagggaaggagaaacaaagttgacttatatcgtacaaacaaacgggctgaccaaaacgtatcagggcaaagaggtcgtatccaatgtcagcatgcatattaaaaaaggtgaaatctacggctttctcggcccgaacggcgcggggaaaacaaccattatgaaaatgctaacgagccttgtcaaaccgacaagcggtgaaatcatcatccttgggaacaagttcacccacacgtcatatgaggtgctggggaacatcggcagcatgattgaatatccgattttttatgaaaacctgacagctgaagaaaatttagatctgcattgtgaatatatgggataccacaataaaaaagccatacaagaagtgctggatatggtgaatttaaaacaaatcgacaaaaaacccgtcaaaaccttttccctcgggatgaagcagcgccttggaattgcgcgtgccatcctcacgaagccggacctgctcattctggatgagccggtgaatggtcttgaccctatcggcattaaaaagatcaggcaattgtttcaagtgctgagcaaagagtacgggatgacgctgctgatctcaagccacctgctgggtgaaatcgaacaaatcgcggacacaatcggcgtcattcgggacggcaggctgcttgaagaggtatcaatggaggatgtcaggggccagaacactgaatacatcgagcttgttacgccgaatcagacaagggcctgctttgtgctggagaaagagctgcaattaaccaactttaaaattttaaatgagaaaacaatccgaatttacgaggctgaagcctctcaggctgccatatccaaagcattgattttaaatgatgtagacattgaatcaatgaacaaaaagtatacgtcgctggaggattattttatcaaattgatcaacggcaatagcatcagtgcgtaaaggaggagagacacgttgatgaatttgatcagaatcgaattaagaaaaatgaaaatgggctggtatatgagaggtgccctcattgccaacgtgatcattatgggttttatgtggctgatcagttattccgaaaaagccgatggcggggtttcgttccaaagtacggatgaagcattcctcatcatcggcaccttcgtcagagcggtatttatcgtatttggcgctgtgctgatcgtaaaattggtgatttcggaatataaaaacaaaaccattcttgtgatgttcacgtacccgatcagccgtaaaaagctgctcaccgctaagctcatgatcgcgggcggactgacgtttatcacgattttactttcaaatatactcatagccgccggtttcttttggctgaactcgatctgccatttcataccgggagagcttacttccgagatcatttctcaacaggcggtcaaaatggcggttttcgcttttggcgccgctggaaccagtttagttcccatcttttttgggatgcgtagacactcggttccggcgaccatcatttcatctgtagtaattgtgatgctcatcagctcaacaagtccgggcttctcgatttcatctgttgtgtatatcccgttatcgttagcggcattcggattgttcttttcctacatggcgatcaggaatgcggacaagcaggatgcgtaaacaaaagcgcccaatatgtataaaaggccgatgctgtcagcatcggcctttccattatgagtctgttcttgtttcaagataatgcttcttgccaatctctttgctcatcatatagaaatggaagcaatattcaccgattgccatgacgatcgcgccgaataaagccgccaacgcaacttcaccgccagtcatccctagggaaagcggcatgcccatcagccagatcacaagaaaggccaagccaaaatcagccaaagttgcaatcatattattccatctcggcaatacataaagatcgcccagcaaataagaaataacccctaacacaatcgtcattagcagcgtatcaccaaacgtgaaaccaaagcccagaccaagcaccagatacaacacaataatcgtcataatacctttaatcgcgagcgctttcacatgtgtcattacaattcctccttttgtcatttgatttgttatgtataattcctcaaatgtaaaaagttaaaccttatttcttttcggaggcgggtgcaaatctgctggggaggggtcaatgatgtgaatccaggaattgaggctgcggcgcttcgacagcggaaacgtgaagcttgtactgcaccggacgctgctttgatgcccaacagcccattatgtttgctgtttttagatgaataaatttaaaaacttctcctgtccctccgtcatcacttctgaagtaatgaaatatgatgaaaagagatcaaggggaggtgacgtgatggcggtcgtgagagcaacgagtgcggatgtcgatttgatggcaaggctgctcagagcggaagcggaaggcgaaggcaagcaggggatgctgcttgtcggcaacgttggaattaatcggctgcgggcgaattgctcagattttaaaggcctccgcaccatcaggcagatgatttatcagccacacgcgtttgaggctgtgactcatggatatttttatcaaagggcgcgagatagcgagcgtgcccttgcacgccggtcgattaatggtgaaaggcgctggccggcaaaatttagtttgtggtacttcaggccggagggagactgtccagcccagtggtataaccagccgtttgtggccagatttaagtcacactgcttttatcagccgacggcggagacgtgtgaaaatgtatataacacattttagagacaggacaccgttcaaattgaacggtgtttttatttgaaaagatgcaatggaaaatattcctgtgagataatcgaagaaaaaagagctgacggagatgacagaatggcaacaattgacctgcaaaagaaaagtgtaaagatcgtactggagaaaaagcagttaacgaaggtgacggctcgtgtcggactggttcttgatattacgggatcgatgagaccgctctacaaaaacgggacggttcaaaatgtggtggagcggattttggcagtggctgatcagtttgatgataacggtttgctggatgtatgggtgtatgataatgaattttcccgattaaagccagtttcagaaaaggatttttcgggctatgtcgatcgtgaaattttaaataatgaccgcttgcataaattcggcagaaatgatgagtcgccagtcatgaaggacgtgctgcgcaaatatgttacggaggaaccgagctcgtatcctgctttcattgtttttatcaatgacgggggctgtaaaaagtcaatcaaaccgataattgaagcttcttctgataaaccggtgttctggcagtttgtcggcatcggaaacggaaactttgattttctcaataaactggatacgttagaagggcgtgtcattgataacacgaacttcctgcatatcgaagagattgaccgcatttctgatgatgagctttatgatgctctgcttgctgaatttccattttggctgaaagaagcgaaggaaaaagggattgtaagagaacaagagcctcctgctgaaaagccgaaaaagaagggctttttcagcagattgttttcgaaataactgataaggcactgagccattctgcgaaatggctcggtgtttttgtttttttaagatcatgtgaagaaaaatagtccaaatgggcggcttgcaaacgacaggatatgcagaaaacgcgtcattcagccagctttcggcatgttttagcggcaggcttgtgagggaagacctgtttttgatgttcagcgcttacaatcagttcacacttcttcacagtcgtttaacaatgatttcctataatggagacgatcaatgaggagagaggggatcttgaatggcatacgacagtcgttttgatgaatgggtacagaaactgaaagaggaaagctttcaaaacaatacgtttgaccgccgtaaatttattcaaggagcggggaagattgcaggactttctcttggattaacgattgcccagtcggttggggcctttgaagtaaatgctgcgcctaaattctcaagctatccgtttacattaggggtagcgtcaggtgatccgctttctgacagtgtcgtgctctggacgcgcctggcacctgatccgctgaatggcgggggaatgccgaagcaagcagtgcctgtcaaatgggaggtcgcaaaggatgagcatttccgcaaaatcgtaagaaaaggcactgaaatggctaaaccgagtcttgcccattccgttcatgtggaagcggacgggcttgagccaaacaaagtgtactattaccgtttcaaaaccggccatgaactaagccctgtcggaaaaacaaaaacactgcctgcccctggcgccaatgtgccgcaaatgacctttgcatttgcttcctgccagcaatatgagcacggatattatacggcctacaagcatatggcaaaggaaaagcttgatcttgtcttccatctcggtgattacatatatgaatacggcccaaatgaatatgtatcaaaaacaggcaatgtccgcacgcacaacagcgcggaaatcattacgctgcaagactatcggaaccgtcacgctcaataccgttctgacgccaatcttaaagctgcacatgcggcattcccttgggttgtaacttgggatgaccatgaagttgaaaacaactatgccaataaaatacctgaaaaaggacagtcggttgaagcattcgtgctccgccgcgcggcagcataccaggcatactatgaacatatgccgctccgcatttcctctttgccgaatggcccagatatgcagctgtaccggcactttacgtacggaaacctggcgtccttcaatgtgcttgatacccgccagtacagggacgaccaagccaataacgacggcaataagccgccttctgatgaatcgcgcaatccgaatcggaccctgcttggaaaagaacaggagcagtggctcttcaacaatttgggcagctcgactgcccactggaatgtgctggcgcagcagattttctttgccaagtggaatttcgggacaagcgcaagcccgatctacagcatggattcgtgggacggctacccggctcagcgcgaacgggtgatcaatttcattaaaagcaaaaatctgaataatgttgtcgtactgacaggtgatgtacacgcaagctgggcatcgaatttgcatgtcgatttcgagaagacaagttcaaaaatattcggagccgaatttgtcggaacctcgatcacatccggaggaaacggcgccgataagcgggcggatacggaccaaattttaaaagaaaatccgcacatcaagttctttaacgactatcgcggatatgtccgctgtacagtgacgcctcaccagtggaaagccgattatcgggtgatgccgtttgtgaccgagccgggcgcagccatttccacgcgggcttcattcgtttaccagaaagaccaaactgggttgagaaaggtatcatccacaacaatccaaggcggggtgaagcaatccgatgaggtcgaagaggatcgtttctttgcgcacaacaaagcccacgaaaaacaaatgattaagaagcgggcaaaaatcacgaattaaggagtggaaattatgttttcaaacattggaataccgggcttgattctgatcttcgtcatcgccctcattatttttggcccttccaagctgccggaaatcgggcgtgccgccggacggacactgctggaatttaaaagcgccacaaaatcacttgtgtctggtgatgaaaaagaagagaaatcagctgagctgacagcggtaaagcaggacaaaaacgcgggctgaatgctgatgaggcagacaccgggtctgcctctttttttatgaaagggagggcttttttgaatggataaaaaagaaacccatttgatcgggcatttagaagagcttcgccgccggattatcgtaaccctcgcggcattttttctatttctcatcacggcttttttgttcgtacaggacatttatgactggctaatcagggatttggatggaaagctggctgtgcttgggccgagtgaaatcctctgggtgtatatgatgctttccggcatttgtgccattgcggcttctatccctgttgccgcgtaccagctgtggcgtttcgttgcaccggcgctgacgaaaacggagcgcaaggtgacgctcatgtacataccaggtttatttgcgttgtttttggcgggcatctccttcggatactttgtcttgtttccgatcgtgctcagctttttgactcatttatcctccggccactttgaaacgatgtttacggctgaccgctactttcggtttatggtgaatttgagcctgccgttcggcttcttgtttgagatgcccttggtggtgatgtttttaacaaggctgggcatcttaaatccttacagactggccaaagcgagaaagctgtcctattttctgctgattgtcgtatctatattgattacaccgcctgattttatttctgattttctcgtgatgatcccgcttcttgtcctgtttgaagtgagtgtcaccctatcggcgtttgtctacaaaaagaggctgagggaagaaacagcggcggccgcttagtgcagcgtaccgcccggtgacttcacatcctcatcatattgtgcggccgtaacagcggcgattctcaatgcccggacaatcgtgtccaggctgaggctcggcgctgttttgtcgattgtttgctgcggaatgtaaggaatatgaataaaaccgccgcgaatgtgcggggatgtccggctaatgtgatccattaacccgtagaacaaatagttgcatacaaaggtccccgctgtgtaggaaaccgcagctggaatgccgtgttccttcatcttagcagttattcgtttcacgggaagccctgtccagtaagcggcgggcccatctggagaaatctcttcatcaatcggctgatgtccttcgttatcggggattcgcgcatctgcaaggttgatcgccacccgttccggtgtaatctgcatccgtcctcctgcttggccgacacaaatcacgatatctggctgatgtgtttgaatggcttggcgcagagtgcccagagcggatctaaagacggttggaatttgttccgctgtaataatggcttcttccgtctcgaagccattaagccgtttcgccgcttcccatgatggattgacggtttctttgtcaaaagggtcaaaaccagtgatcagcactttttttctcatcttctcatctcctttttcttttattctattgtttatttatgggtttttcatcaaaataatgtaaaggagtgaatcataatggagcatttaccgcagcagtatcgtcatttattcccaaccttgcagacgcatacgatgcttgccagctgttctcagagcgcattggcagagcctgtatcaagggcgatccaggattatcatgacagcctgctgtataaagggacgaactggaaagaagcgattgaaaaaacagagtttgcgagaaacgagtttgcaaagctgatcggggctgaaccggatgaagtggcgattgtgccgtcagtttctgatgcactggtttctgtagcatcgtccttaactgcatttggaaagaagcacgttgtatatacagatatggattttccggcggtgcctcatgtttggcaggcacactccgattataccgtatccgtcattccatcaatagacggcgtgctgccgcttgaacaatatgaaacgcatatttcggatgaaacagtactgacgtgtgttcctcacgttcattatcgtgacggctatgttcaggatataaaagcgattgccgagatttctcagagaaagggctctttattgtttgtagatgcttatcaatcagccgggcatattcccattgatgtgaaggaatggggcgtagatatgctggcagcaggcacccggaagtatttgctcggcataccgggtgtggcgtttctttatgtgagaaaggagctggctgacgcactgaaaccgaaagcatcagcttggttcggcagagagaacggatttgatggggcttatgcgaaaggcgcgcgtcgttttcaaacgggcaccccagcttttatcagcgtatacgcagctgcagcggctttatcgctgctgaatcatattggggtttctcatatcagggatcatgtgaaaacgatctgtgccgatgcagttcaatatgccgctgaaaaaggcctgcagctggcggcggcacaaggtgggggtcagccgggcatggttgcgatccgggatgagcgggcatcggaaacggcggcgttgctgaagaagaaaaaagtgatttgcgcgccgcgggaaaatgtgatccgtctcgctccccatttttataatacgaaggaggaaatgcggcgcgcgattgatgaaatcgcggcgaaaacgatccacaagtaaacataaaaaaagcccctgaacattagtcaggggcttttcatattaatgatctaccttcacgcgcttcataaagaaagcgccaattaaaccgataatggcaacaatcattgcaaacacaaatgcgtgctgtacacccgctgtcaaagcttgcgggatgactgccggatcggcagggtttttaactgtactcatataatcatgctggcctgcagccataatgctgaccgcaaccgctgttccgatagcgccagccatttgctgcagcgtgttcataatggcggtgccgtctggataaaattcgcgcggcagttggtttaaaccgtttgtctgtgcaggcatcatgatcatagaaatcccgatcatcaagcaggtgtgcaggatgataatcagcacagctgttgaagtggtcgtgacatttgagaagaaccatagtacaacggtgacaatcacaaatcccggaatgacaagccatttcggcccgtatttatcgaacaagcggcctgtaacaggggacataaatccatttaaaataccgcccggcaagagaacaagaccagatgcaaatgcagtgaggactaagccgccttgcagatacatcggcagaagcagcatagatgacagaatgaccatcatacaaatgaacaccatgatcacacccaaaataaacatcgggtatttgaacgcacggaggttcatcatcggctgcttcattgtcagctggcggattgaaaataggataaggccgacaacgccgacaatcagcgacacgataacagtcgggctggaccatcccccggagccttcacccgcgttgctgaatccgaacacaatgccgccgaagccaatcgtcgacaggatgatagacaatacatcgattttcggctttgtcgtttcagatacattctgcatatatgcgataccgaaaacaagcgccagcacaaggaatggaagagagatccagaaaatccagtgccagttgagatgctccagaaccaatcctgagaaagtcgggccgatggcgggcgcgaacataatgacaagcccgatcgttcccattgcggcgccccgtttatgaggcgggaaaatcaccaagattgtgttaaacatcagcggcagtaaaagaccggttccaagtgcctgaacgatccttgccgccaataaaaacgggaagcttggcgcgagtgccgcgatcaaggttcctataattgaaaagattagtgacacggtaaaaagctgtcttgttgtgaaccactgcaacagcagtcctgaaacaggaacaaggataccgagtacaagcaggtagcccgtcgttaaccattggacggttgccgctgtaatgttcaattccttcataaggtcggttaacgcaatattcagtgctgtttcactgaacatgccgataaaaccggccaacagcaaggaaatcataatcggcatcactttgtattgctgagatgctttagctgttgtttccaaaatcatttcccctctctatcaactgcatgtagtatgtcgtttttttatctcttcagcaggtcaggaatgcagctggagatatgaaggagcggcgtactgttttttgccgtcaaagataaaagaatgccgccttcaatcatcgcgttaaccacagtgctggcttcttttgcacggttctcgctgcagccagtctgccgcagtttttcctcatatacagaggcccattctttgtaggcttcatgacaggcttcgcgcaacggttcgcttttcaatgacgtctcagccgctagcaagcccacaggcaagccttcaatgtcttccgtacatgaaaactggcaggagagctccttcaaaaaggcttgaatgccttccgctggatcggtgcaggcttccatgcagtccgcgattttctgacggatatactccttcatctcattcacggcttcgatcgcaagctgttctttacccccgggaaagtggtagtaaagagagcctttaggcgcgccgctttcctttataatctggttcagccccgtgccgtaatacccttgcagctgaaaaagccgggtagctgccgaaaggattttctcacgggaatctccataactcataacattcccaccttactgaattgcaatcaaaaatatagtgactggtctattatcttgattcaatcatcaattgtcaagaaaaattcattgtatgaaaagacaaaaaaagaaggatatgacaacaaaaaatactgagagaaaagctgactgatcttttgactgaatagataaaatgtacaatgattaatcatcatatggatgtaaggagagaaatagatgaaaaaacaacgaatgctcgtactttttaccgcactattgtttgtttttaccggatgttcacattctcctgaaacaaaagaatccccgaaagaaaaaacgcagacacaaaaagtctcttcggcttctgcctctgaaaaaaaggatctgccaaacattaaaattttagcgacaggaggcacgatagctggtgccgatcaatcgaaaacctcaacaactgaatataaagcaggtgttgtcggcgttgaatcactgatcgaggcagttccagaaatgaaggacattgcaaacgtcagcggcgagcagattgttaacgtcggcagcacaaatattgataataaaatattgctgaagctggcgaaacgcatcaacgacttgctcgcttcagatgatgtagacggaatcgtcgtgactcatggaacagatacattggaggaaaccgcttattttttgaatcttaccgtgaaaagtgataaaccggttgttattgtcggttcgatgagaccttccacagccatcagcgctgatgggccttctaacctgtacaatgcagtgaaagtggcaggtgcccctgaggcaaaagggaaagggacgcttgttgttcttaacgaccggattgcctcagcccgatatgtcaccaaaacaaacacaaccacaacagatacatttaaatcagaagaaatgggcttcgtcggaacaattgcagatgatatctattttaataatgagattactcgtaagcatacgaaggacacggatttctcggtttctaatcttgatgagctgccgcaggttgacattatctatggataccaaaatgacggaagctacctgtttgacgctgctgtaaaagccggagcaaaggggattgtatttgccggttctgggaacgggtctttatctgacgcagccgaaaaaggggcggacagcgcagtcaaaaaaggcgtcacagtggtgcgctctacccgcacgggaaatggtgtcgtcacaccaaaccaagactatgcggaaaaggacctgctggcatcgaactctttaaacccccaaaaagcacggatgttgctgatgcttgcgcttaccaaaacaaatgatcctcaaaaaatccaagcttatttcaatgagtattgaagaaaagaaggcgaataagccttctttttttggctttttaggaccaataatgacctctgaatcttaaaatttctttaaaaataagccaaaattaccctttacttaattaatttggtaacgtaatataattgaagaatttgttacaaaaaaaggaggatattatgaaatttgtaaaaagaaggatcattgcacttgtaacaattttgatgctgtctgttacatcgctgtttgcgttgcagccgtcagtaaaagccgctgaacacaatccagtcgttatggttcacggcattggaggggcatcattcaattttgcgggaattaagagctatctcgtatctcagggctggtcgcgggacaagctgtatgcagttgatttttgggacaagacaggcacaaattataacaatggcccggtattatcacgatttgtgcaaaaggttttagatgaaacgggtgcgaaaaaagtggatattgtcgctcacagtatggggggcgcgaacacactttactacataaaaaatctggacggcggaaataaagttgaaaacgtcgtgacgcttggcggcgccaaccgtttgacgacaggcaaggcgcttccgggaacagatccaaatcaaaagattttatacacatccatttacagcagtgccgatatgattgtcatgaattatttatcaagattagacggtgctagaaacgttcaaatccatggcgttggacacatcggccttctgtacagcagccaagtcaacagcctgattaaagaagggctgaacggcgggggccagaatacaaactaatgagataaataaccttgaagagtcctattcttcaaggttattctgctttcagcacaatggttttcgccgccatatcatgaacggtttgttttttcttcgtaaatgcggctgtcaaatagatcaggcgggagaatacatgcacccacgctatgatgtaacggacaatcgcctgtaggaaagaaattttctcgtgtgtttcgtccctcacgatttgcagcccgatgatttttttgcccagtgtgcccttccaatttgtcagcggcatcagcaaaggatacacaatcagcatcaatatggcgacaataatgacaccagcggacccatcgccaaacgtaaatccggctgccaaaatcactgctgcggcaatgattacatcaagtaaaagagcgcaggcgcgcagcatgaaaccagctagttccaatagaaacactccttaaaatgttaaataaacacctaatgattgtaaaaaagaagggcctaaagtgggaataggtgataagccttaaatcacaaaagttggtgaaaatgtcataggtaaattggcataatcagccagcttatcacattaccaaattcttttttagcccgaaaccaagccctcagaagttatttttgttaaaatagaaaagttacaacagaattcggagggtttattgtgggaaaagtgaaacgaaatgccccttgcccatgcggcagcggcaagaaatataaaaaatgctgcggaagtaaagttgtcgacttcccggcggaactagcggcaaaagaagcgaaacaaattcaggaagacttagtggagtatgccttcacagtacatagagaaagcatttcaggctttatcaaccagcatgattttctttctgctatggacagacagacgaaagacatcagcgtatttaacttaggaatctggggaatcttcttccacccgcttgctggtgagaagacaatcttcgaagagtaccttcagaaaaaaggcgattcgatcactcgtccgaaaacgcgtgagatcgtagaatcatggcagagcatgacgcctgctttattgctgctgaaggacctgaaggaaggcatcattcactttgaagatgtcattacggcaaaacaattcgaagtggaaatggacgccagcaatcaagaccttcctccagtgggaagcctgattcttggatacccaatccacgaagcggaaaaagcagaattcttcatgcagttcacgatcttcccggtgaagagaacagaagcgctgatcagcaaggtgaagaaatatgcggatgccgctgtgaaggacggcaaaacgccggaggacttcatgaagcaggaattcaacaacgttctgttcgcgttgttagctgagaaagatgaagagccacaagcagagaaagcggaagtaagcactgttgagtgggcaaacgacttggagaaagaaaccgctgcggctattgaagaaggcatgagcggggaagagtatccgactgaattgatcccagctgttattgacatctggaaaacattctgcgagaaaaaatcacctgtcatcagaaagccggaagcttttgcggcggcagttgaatattatgtaaacgcaatttctcttaacggcgcgtccgtttcccaggctaaactggcgaaaaaatacggcgttagcgcatcaacgatttccagccgttacaaagaaattgaaagcacgctgcaagatgaagcagatcgttttgcacaagcgttatcctcataatggaaaaaaccttgaaaagccaggcttttcaaggtttttttatttctgaaacggaattttgatttctaaccggaagacggggtggcggtaggtaaaatccagcctgccaaaagcgctcttcaccagtttttgaatgatatatgtgcccatgccttcatgagcgccgtttttcgttgagcggccaaacgattgataaattgtatcgagcacttttgggtccatcccgggagtgctgttttcacaagtcagtacataaagtccgctgcgcagtgaagtttccagtttaatctctgctttttctcgggcctccgctgcgctgtcgagcgcattttctaatatgttgccgaccaagctgacctgatcagcaggcgaaaacggaagggaagaaagcggtgtatgcatatgcagcgaaacactcacattcgaggcgcgggctttttctaaaaaatcataaagcacccctgcaacgtacgcgttctctcctttcaaaaaacggtcatattggctgtattgatccgcccagttttgaatatatgcttgtgtatctgccttgggctgagctgatttgattgcagtgatatgtttcattgtgtcatgattctggcttctgacatcaatcagcatttgattggcgtgctgttcagcttgagtcagcttatcaatttgatcagaaagccttgcctgcaaagcagactgtccgatacggagcccttcacaccctgcaaatatcgcgattacacataataccggcatgatgtctgtgccaatcaacactactcccgccgacatcacttgaatcacagcaatccacgcacaaagccctgaggaacagtgtttccacacccgcttcgtattccaaatgtacaatcctgcagcagctgcgcctaaagcagcggcgagccaagaggcggctgtgctgtgtgaaaaagcagcagctccctgataacatatgaaactaaataaaaccagataaagacattgaaaaagggtaatcacgttctgaactcctcaaaagtagtagttttgaaaataatcaagctgctgcttggtgatcatcgcttttttagacgttccctcaaaagaaactgtaaatgaatgcttggtataagcggaaaaatgctttatgtaatgaatgttgataataaaggaacgatgcgaacgaagaaaatccttttcgggcaggtcgcctttaatatcatttaatgtttgatacgtttgcacctcttcggcggttgtcacaatcgtcgtcgaacgtcccgtccgttctgcgaaaataatatccttcttttgcaggacatgcatttcagacttttgctttatcaatatacgcccattcaaactcgtttccgttttctttttcaagtaccggtcgaaggaagcggccagacggtcggcatagtacggcttcataatataatcatggacgttcaggtcaaaggcgtgaaccgcataaccgccgtggccggtaacaaaaatcacatccacatcaagtgaatgggatttgatcaaatcagcaagctcgtagccagacatatggggcatctcgatatcggcaagcagcagatcaatgtctccgttctttacccgcctgtaggcttccttcgctgaatcggtggaaaagacaatttcgacgtcctgcattctggacacgatcgcttccagcttctctaaatctactcgataatcatctacaagtccgacttttaccattatcattcccctagttacatagaatcatctttattctatcccatttcgcgacataaaaagaactcttcgcgacaactttatccaactaatccagcttttcgtatatagtcattactagaaataaagataagggagattgtgacatgattacactgaccgattgcagccgcaggtttcaggataagaaaaaagtagtcaaagcggtgcgagatgtaagtttaacaattgaaaaaggagaagtcgtcggcattctcggagaaaacggtgccggcaaaacgacgatgctgagaatgattgcttccttgcttgaaccatcacagggtgtaatcacagtagacggctttgacacggtcaagcagccggctgaagtcaaaaaaagaatcggtgtcttattcggaggagaaaccgggctttacgacaggatgaccgctaaagaaaatctccaatacttcggcaggctgtatgggctgaaccgccacgagatcaaagcaagaatagaagatttatcgaaacggttcggcatgcgcgattatatgaaccggagagtgggcgggttttcgaaagggatgaggcagaaagtcgccattgccagagcgctgattcacgatccggacatcattttatttgatgagccgacaactgggcttgatattacgtcaagcaacatcttccgcgaatttatacagcagctgaaaagagaacaaaaaacgattcttttctccagccacattatggaggaagtgcaggcgctctgtgacagtgtcatcatgattcacagcggagaggtgatttaccgaggggcgcttgaatcactatacgagagcgagcgcagtgaggatttgaattacatctttatgtctaagcttgtcagggggatttcttaaatgctgagccatatttataaaaaagaaatgatcgacgctttgcgcgacagaaaaacgattttactcacaatcttagtgccgatgattatgatgcttggacttgtcttcttttatgaaagcatgctgtccgacaaaggggagcagtacacgctggctgtcggccattcgctgccgcccgcactggaaagcaagcttaatgagattgacgaaatcagcgtaaaaacatttgcaaagcctgaagaggcagttgatgaaggaaaagcagatgcctatctgaacgtcccaaaagagttcgactcatatgtcaacagcatgacaccttttaaggttgatgtttacggcaattcaatcgatcaagggtcgtcaaatgccatgcagcttgtgcagtctgccttagatcagtacaaaaatgaaattgtgcagcaacgtttaacaaataagcatattgatcaatcggtgatccagccgtttacaattcagcaaaaggaagcggatgaggagaaagggacttccgctattatgctttccgccattctgcccatgctgattctgacttccattgtttccggcgcaatgccgatcgctcttgatatcatggccggtgaaaaggaccgaaagtcaatcgaggcgctgctattaacgccagtcagcagaaacaaaatgctggtcggcaagtggcttgcggtttccacttttggcgtggcttcaggtgtattggctttgatgtttttgattttgtccaccgtgttatttaccgaaaatttaaaaacggccttccagctgggagatcatatgtggagtgtaatcggcgcttcagccttaatcattgtgctctctgcattgctgatatctgcgatggagcttttcatcagcatcatgtccagctcggtaaaagaagcgcaaagttatatgtctctcgtcgtctttctgcctgtgttcccgatgtttttcatcttcagcaaggcaccgaaccaatttgacttatcatactttctcatcccgtttctgaacctgcatgcgttatttaaacagcttttattcgggatggttgacccggctgccattttgtctacgtcaggaaccatcgccgtgctcatcgccatcttctttttactagccagagcctgcttcctgaaagacaaatgggttcttccaaaataaacttgcgaaaggagaaatacactttctcctttttgtatatcctgaaaaaagaaggaaaatagaaaaaggatatctaatacaaaaagtgaccctgcactatttttcatcaaaattggtttcaaaggagaaggaacaatggatcaaacacgtacactcggcaaaacgaagctgaaggtgaagcggatcggattcggcgcgaatgcggtcggcgggcataatctatttccaaatctaaatgatgaaacagggaaggatttagtgcgcacggcattggatggcggcgtcaattttatcgataccgcctttatatatggattggggagatctgaagaattaatcggcgaagtcgtacaggaacgcggcgtgcggaatgagctcatcatcgccaccaaaggagctcataaagaagtggacggcagcattgaattagacaatagccgggagtttcttcgcagcgaggtcgagaagagcctgaagcggctgaaaacagattacattgatttgtattatgttcactttccggatggaaaaacacctctcgctgaagtggcgggcactttgaaagagttgaaggatgaggggaaaatcaaagcaatcggcgcttcgaacctcgattatcagcaattgcaggattttaatgctgatggctatttggaggtcttccaggccgaatattctctcatacagcgtgatgccgagaaagagcttcttccatactgtgaaaaacaaggcatctcctttattccttactttccgcttgcgtccggactgctgacaggaaaattcacgcgagacacagtctttgatgatttcagaaaggataaacctcaatttcagggtgaaacgtttatccacaatctcaaaaaaatagataagctgaaagcagtagcggaggaaaaacaagcggatacggcacatgtcgccttggcgtggctgttaacgagaccggcgattgatgccattattccaggagctaaacgacctgagcaattacaggataacctgaaaaccttgaacattgaactcaccgaagacgaagtgaatttcatcagcgacatttttaaataaaaaggaaatagccgtcaaggctatttccttttggtgttttattctttgatgaatgcttcgactaattctgctgctctgtaatcatccatatcaagctgccattggtcgatgtcatttttcttcattttcacttcaactgttttttcagatgaagcaggtccaagctttttaaattcctcagggtagacttgaagcgcgtatttcactgcctcttcatagctggcactagagtttttactgtagtagtctttcactttgtcttcgatacggtctgaaagagaagatgcatctacaggtttaactgttgcttcaacaattgcttcgtctttagagattgaagtcgtttttgcttgaatggaagagtttttgcttaatccctctttaatgccgttcacgatattatcaagcgctttgctgtccgcatatgtgctggaaaggccggaagctgagagataaccgtctttggctgattcattgaaatcatttacaatttcatttttgttagcgccggtgattttttcgaaatcggcgttatctttgccgaaaagaaggacatcaacataagctgataacgcttttgcagaatcttggagcttatctgccgtcgccaggatttttttgtcttttccgtcaattttaaaagtaactgattttggctttttatcaccgtaagattccggcgtatagttaagctcgtattgcttgcctttatctacaacgaagaaaagatttccttcaacggatttgtcagcgttaatcgtgctgccttgaagcttttcgctatagtcttcagggtctgtgtcagacattttggtatcaccttgatacaatgtgaaatccatactgtctacattcagcgggtcttttcctgtgtttttcaccgcgacattgacttttaacacaagctggtcatctgaagtggacttatcatatttagacggaagtgtgtaagagacatccttgattttgacttgagctatatctgagcttttttctgtttctgattctttcttctccgcgcttgttttgctgccggaacaagcagctgtaaacatcatcagcagaagaattaggaaaacagcgtacgtttttttctgaaacattcatttttcctcctcaaatggtttaggaaaggggagtcttttgtctttgagaaatggatctttttgaatggattagcatcatataaccaaaaaaatcagttcttttctcacggtttttaccggattttctggaaactccgccctcctttgtcatgaatggacctataaaaagttacaacggaattaattttaagattattagcttttatattgaataggttcatcatcctatttttggtgaaaaatgttctggtaaaactggtaaactcagaaaactgtgtattttagactattactttttgattagttggagggaacttaagaaggatgaaaggggctgcctttgtgaagaaagagggactgaaacaaaaagcactggaaatcggccgggtgccgacacacttaaaactggaaattgaagattatggcggtgatgacaaaagagcctatttttgttggagagatcctcaggatgagaatatcggcattatcgtggaacttggaccggacggggagctggaatccctttcccgtgatattgagcctgaaagcggagaaaggctgtctgaggagaaactagaggatatcatgcgccaatttgtcgagactcatcatccgggggcactctctgcctttgttcgtgaagaaaatgaccgtgcatacggcgataaagtgagattttcatatgttcaaatggaggctgggcttcctctccccatgagcggatttatggctgatgtttccttatcaggtgagatcgtttacttccgctattacggcgaagcaggcagcatcatcaagccaaagagggtcgcggatgttgaagaggcacttgcctttatcaagaaggacgtagagttcgaccttttgtttgaggttctccatcgttctgtttacaaaaatggagatgatcagccacatttggtgtatgagcctgaatgtagggcgattaccgtacctgcggatttggttcaagaagaacaaggaggagttgatgatgacgataattacagggagcctgagagctttcctctccctttattcgagggcatccgcgaaaaggccgatcctgacagcatgattggtattgaaaatgggtttgtcaaagagcgggaagcggatttgggagatgggagaatcggaatcgtttggcggaatccggatgaccctgtgtatcagccggcggataaaagcatggacagctggtttaagggacggactcatcaagtgctgaaaaccatctataacaaagaaaccggaaaactcgaaggcgtcatgtcatttatggaggaaaaagggccgctgacagtaactttggcagagtgcgaaaaaattgcgcttcgctttctgtttgctttatttccgaatgccgatcaatattttaggatcagatacgatgaaaaggatgaagaagaaaacgcagtcactgtttttacatttgaaacgcattgtcacggagttccgctccgatttgggcagatcaaaatttgtgtcagccgccagacagggtatatcaccgtttatatgggaccggatattgacccaaatgagctggcaaccattgatcctgtgccggccatttcagttgaacaagccaaggctatcttttggcagcattttaaagttgagcttggctgggaaagagagtacggagatgatgaagaacacagctaccggctcgtctataagccggtgtatccgcgttttatcgatgcacatacaggagagcctgtcttcagctcatggtaaaacagccaaaagtcacgcaattgcctcaggtatagaagagagtacgtgatgaaagtaacagaaagaatctcgaaaaacaatgacaataatagaaaaggacctttcttcactttaaaagaagaaaggtctttttatataataaacaggattctctttgtcgtagactctttgaaagggatgacttcattggttaataaacagctgaaaaagatggcgcaggagatcggaaatgtaccgacgcattatgagcttgagatagaagattacgaccaaaagcaaaagaagaacgggcaggcatattttatctggaaggaccctaaagatccggaaaggcacattacagttgaacttagaaatgacggcgctttgctcaccttttcaacaactgtccgctccgagacagacaaaaaacttccagatgctgagctgaagctgacggctcttcagtttgccgctgcccatcatcccggcacatttatgaattttcattttcaaggcaaggaagaacgggggcagcacatccggtttgtctataccaaaatggagctggggcttccgattcccaattcaggctttttaattgatatgacacgcagcggtcagattgtccactttctatattacggggaagggcataaagccgaagttccgacggaatttgtagcaaaagagaaggttgtgtcccattacttaaacacaatgtcttttgagctgatgtacgatgtcattgatggcgaacaggaaccaaggcttgtatatgaaccgattctcccgggatacagctatcccgcagatgtagacgaaattgtgcccgatcagcatatcgcagatgaaagaatagaaaacacggcgtcactgccgccgcttcagaacaaggaagaagttgatatatttgccttgctgggttttacctctgatatgcagaaagtcagtgaaagagactttggggaacaaattggaagcacgtggcgcaggggcgctgcgccggagcgtaaggatttaagcataggaagctattttgaaacgagaaataaaaacacaatcaaaatgaagacggataaaagaaccggaaaattaaaagcagcgctttcttttatggagcggccgaacaaccgccaatgctccacggaagaatgccaagagatagcgcttcaatttttgtatgccctctatccgagagcggctgagtttttcagggtgaatcccgtccgaattgatgaaagagggagagtccgcaaccatttttctgtctggtataaaggagtgccgctgcggttcggcgctgcccgcatcattgtcaatccggaaactgggttgattgacgcttttatggcgcctgatattgaacctgaacaattggaagcgataaatcacaggccggatgtttccgctgaagaagcaagagaagcgtttttagccgcttttgatgtgaagctggaatggcagcctgattttacagcaggcagtgaccagcactacaaacttgtctataagccggtttacccttcatatattgatgcgcacataaggaaaaagaaaaggctgtgaggggtgtctagttaggaatcatctccaagtgggggtagtccttgaatcgtttccaatccccgccccattcaaaaccgagtgtcttagcgatctcgacaacctccagccaatctgattttccgttttgattgccgtcatattccatatcccatatgatgcttccatcctttttttgaagggcgaaatcaatcgctaaaccatagttatgatacgattcccctcctcttgcataggtgacaatattccctttttttgtacgtccctgtttatataattcatcttgttccttaaaggacctgaatccttcagtaatgacgacggtaatgcctttattcgctgcagcggctttgagtgcatcggcattctgcttcacaatcggatgaagatccgaggggacaggcatgtcctgcagggcgttttgagaatgccattcatgccgaatataactaaaacaaagatctagaagaaatagaatacataagataacaaatgtttttgcgggtaacttcatatcggtctcactttctcaagatgtgctgaatgtgaacgcttttaagtgattgactctctctaaaagcgaacagctatgataaaatataacataaatagtagcaggaggaaggaggcagaccgatgagagcaaagattccatcagaagaagtagcagtaaagctgaatgaatggtacaagctcattcgcgcatttgaagcagatcaagcagaagcgttaaagcaggagattgaatacgatttagaagatatggaagagaaccaggacttgcttttatatttttctttgatggaattccggcatcgaatcatgcttgataagctgatgccggtgaaagacagcgacaccaagcctccgttctctgatatgctgaacgaaattgaaagcaatcagcaaaaactcacgggcttattggaatactacttttattatttcagaggaatgtacgaattcaagcagaaaaatttcatattagcgatcgaccattataaacatgccgaggaaaagctcgagtatgtcgaggatgagatcgaaaaagctgagtttctttttaaagtcgcagaagtgtattatcacatcaaacaaacgtatttttccatgaattatgcgagccaggcgcttgatatctatacgaaatatgaactgtacggtcgccgccgggttcagtgtgaatttatcatcgccggaaatttgaccgatgtgtatcatcatgaaaaagcactgacccacttgtgcagcgctttagatcatgccaggcagcttgaagaagcatacatgatcgccgctgcctattataatgtcggacactgtaagtacagtctgggtgattacaaagaagcggagggctatttcaaaacagccgccgccatttttgaggagcacaactttcagcaagctgttcaagctgtattttcactgacccatatctactgtaaagagggaaaatacgacaaggcagtagaggcttatgaccgcgggataaagagcgcggctgaatgggaggatgacatgtacttgacgaaattccgcctcattcatgagctgtatcttggaagcggcgacctgaacgtgcttacagaatgctttgacctgctggaatccaggcagcttcttgctgacgccgaagatctgctgcatgatacagcggaacgtttcaatcagttggaacattacgagtccgccgctttcttttaccgcaggctgatgaatattaaaaagaagcttgccgagcagcgttttcaataggaaatggcagagaactacaggttctctgctttttttgtgctgttttcaactcggaaaaacagggtattttccactgcatagtgagaaacagaggaggatatcaagtatgtacaaagatttaaccggaaaaacagcgattgtgacagggtcttcaaaaggaatcgggaaagccattgcggaacggttcggacaggagagaatgaatgttgttgtaaactaccacagcgacccgtctggagccgatgaaaccctggaaatcattaaacagaacggagggaaagccgtcgcagttgaggcggacgtgtcaaaagaagaggggattcaggcgctcttggacacagctttagagcatttcggcacgctcgatgtgatggtaaacaactctggttttaacggcgttgaggcgatgccgcatgagatgagtcttgaagattggcagagagtgattgatgtcaatgttaccggaacctttctgggagcgaaagcagcacttaaccacatgatgaaaaacaatatcaagggcaatgtgctgaatatctcaagtgttcaccagcagattccgcgccctgtaaacgttcagtattccacatccaaaggcggcatcaagatgatgacggaaacgctggcgctcaattatgcggataagggaatccgcgtcaatgcgatagcgcccggcaccattgccacagaatcaaatgttgatacgaaaaaggaagagagcaggcaaaaacaattgaaaaaaatcccgatgaaagccttcggaaagcctgaagaagtggcggcagcagcagcttggctcgtatctgaggaagcaagctatgtgaccggcgcaacacttttcgtcgacggcggaatgacactttatccatctcagcttgaatagaacacaaaacagggggattgcgggatgaaaacggactggtggaaggatgcagtggtgtaccaaatttacccgagaagctttcaggacagcaatggagacggaattggggacttgcgggggattatttcccgtcttgactacataaaggagctcggggcagatgtgatttggatttgcccgatctatccttctccgaatgttgattacggctatgatgtgacaaaccataaggcgattatggattcttacggaacaatggacgattttcacgagctgctggaccaggtgcatcagcggggattaaagctggtgatggactttgtgttaaatcacacctcggtcgagcatccgtggtttaaagaagcggagctggacaaaaacagcaaataccgcagctattattattggcgtcccggcacaaagaacggcccgccgacggactggctctcaaactatggatgcccggtctggcaatacgaagagcacaccggagaatactatctccatatgaatgccgtcaaacaagctgatttaaactgggaaaatcccgaagttcgccaggcggtgtatgacatgatgaaattttggctcgataaaggggtcgacggtttgcgaattgatcagctccatctcatttctaagaaagaatatcttccttcgtatgaggactatatcaatcagcaggcagagccgaagccctttcagccaaatggcgaacaaatccatgactatttaaaagaaatgacagatgaagtgttttcccaatatgatgtcatgtctgtcggagaggttggcagtgtcacaccggaagaaggcctgaaatatacgggaacagataagcatgagctgaatatgatttttcactttcagcatatggagcttgatcagcagcccggaaaagaacattgggatttgaagccccttgagctttctgatttaaaatcggttttgacaaaatggcaaaagaagcttgaacatcaaggctggaatacattgttttggtgcaaccatgaccagccccggattgtgtccagattcggagacgatggggaataccgcaaaacatcagcgaaaatgctggcagccgtactttattttatgaagggcacgccgtatatttatcagggagaagaaatcgggatgacaaacgcgccgtttacccggattgaagactacaaagatatccaaacgatcaatatgtatcataaacgggtgtttgaaaaaggctatgatccaaatgatgtgatgagatcgatcttagccaaaagccgggatcacgcccggaccccgatgcagtggaacagcggcaaaaatgccggatttactgacggcacgccttggctgaaggtcaatccaaacttcaccgcaatcaatgtggaggaagcgcagggagatcctgattcggtcttaatctattacaaaaagctgatcagcctgagaaagcagtacgcggacctcatgaaagggagctttgatcttttgcttccggatgatccgcagttgtttgtatacatgagagaaaacagtaaacagcagcttttgtcggtcaataatttttcaaaagagcaggctgtttttcagtggcccaagaactgcggcaaagctcaggcctctctgcttctcagcaattataacaacgatgatcttgctgacgaaatggtgttccggccttatgagagcagggtctatcttctggacaaaacaaactaatgattgaagtagcccggcatttttagccgggttttttagtacatatattcgctctgcaggcgggaagaataaatgaaaatgaaatttattcttgcaaaacgtaatgacttcggtttattatgatataggattacaaaatcgttatcattttgatttaaagtttctgaaaaagaggggatatacgatatgtttaaaaaatggagcggtttgtttgtgattgcagcgtgctttttattggttgcagcatgcggcaactcatcaacaaaagggtcggcggattcaaagggtgataaactgcacgttgtcacaacgttctacccgatgtatgaattcacaaaacaaattgtaaaagacaaaggcgatgtggatctgttaatcccatcttccgttgaaccgcatgattgggaaccgacgccgaaagacattgccaacattcaggatgctgatttgttcgtttataatagtgaatacatggagacatgggttccgtcagctgaaaaaagcatgggccaaggccatgccgttttcgttaatgcaagcaaaggcattgatttaatggaaggctctgaagaagaacacgaagagcatgatcatggggagcatgagcacagtcatgcaatggaccctcacgtatggctcagccctgttctggcacagaaggaagttaaaaatattacggcgcaaatcgtgaagcaggacccggataacaaagaatactatgagaaaaatagtaaagaatatattgcaaaactgcaggatcttgataaactatatcgtacaaccgcaaaaaaagcggagaaaaaagaatttatcacgcagcatacagcttttggctatctggcaaaagaatacggcttgaagcaggttccgattgcagggctttcacctgaccaagaaccgagcgcagccagcttggcaaagctgaaaacatatgccaaagaacataatgtaaaagtcatttactttgaagaaattgcatcctcaaaggtcgcagatacgctcgccagtgaaatcggcgcgaagacagaagtgctgaatacactggaaggcttgagcaaagaagaacaggataaaggtttagggtatatcgacattatgaaacaaaacctcgatgccctgaaagattcactattggttaaatcataagatagtgtgcgccggagggtgcacactatttctttgtgagaaaggaagattaacatgaatctcgtctcattgaaagatatcgttttcggctattcccatacgcctgttttagataaagtatcacttgatattgaaagcggtgagttcgtcggcatcactgggccaaacggcgcctctaaatcgacgctcataaaggtaatgctcggcatgctgaaaccgtgggaaggcacagtgacgatcagtaaaaggaatacagaagggaaacgcctgaccatagggtacgtcccgcagcaaatttcttcatttaatgccggctttccgagcacggtgctggagcttgttcagtcaggccgctatacaaaagggaaatggtttaaacgtttaaatgaagaagatcatcttgaagtagaaaaagcactgaaaatggtggaaatgtgggagctccgtcaccgtaaaatcggtgatttatcaggcggacagaaacagaaaatctgtatcgccagaatgctcgccagcaacccggatctgctgatgctggacgaaccgacgacagctgttgattacgacagcagaaaaggattttacgaatttatgcatcaccttgtgaaaaatcacaaccgcacagttgtgatggttactcacgaacaaaacgaagtacagcaatttttagataaagtgattcgattagagagaggagaaaaaggcggatggaaatgtttgacttggaattcatgcgacgagcttttctagcaggcggcatgatcgccgtcatggctccgatactaggagtgtatctcgttctcagaagacaggccttaatggctgacacactttcacatatctcattgtcaggtgttgccatcggcttttttctcagcaccaatataaccgcagcaagcatagtcgtcgtgaccatcggggcgatcggaattgaatacatgcggcgggcgtatcggacttattcagaagtgtccattgccatcttaatggcagctggtttgtccttcgcgatgtttttaatcagcctttccaaaggcacagccaatatgagcatcgatcaatacctatttggatcgcttgtgacagtaaaccagcagcaggtctatattatcagtattatcacactgctgatcctgctttattttatcgtactgagaaggccgctctacctgctgacgtttgatgaagcaacagccaaaacatcgggaatcaatacaaacgttctctcgttgtcattcagtattgtcacaggccttgcgatttcagtcattattccgatcatcggggtccttcttgtatcggccctgctcgtattgccggcagcattcgccatcagaattgcaaaaggctttaacatggttttcattacagccatactcatttcattattcagcgtatttacgggactgacatcatcctatcagctcgggacgccgccaggtccgtctattaccctgctattgatcgttttgctattaatcggatttgcagttcagggagtttggacgtttatcaaaaaagaagctcagcgcaaaaaaaggcaccgataacatgaaaagcagttttccctagggaaaactgctttttttatagaaacaatccggcaaggcgctcataagattcttttttcgcctcaaaatcaaacacattgcacagaaccatgatttcatttgtttcgtagcggcctgtgaggtctaacagctgttgtttgacagtggttggagaaccgatcaccatccgctttctgttttcttctatgagttttttatcggacgctgtgtagggataggctttcgcctcctcgatgcttggcacgcggctgtccaagccttttccgacgcgaagaagccacaaatcctggcttaatgcgagttcttctgcctcttcatctgttttcgcgcaaatgacaaaaatcgtaaacagtgcggacggattcgaaaaatgggctgagggccgaaagctttcccggtagatgcggaatgcattttctcctcgctcgggattaatgaaatgcccaaatacatatccaatcccctgttgcgccgcgcgtcttgcgctgttttcaccaagaccgagcacccatagctcgggtgccgtgtcaataaggggcgccgctttgattccggcatacggatggtcgggaggaagggaatctgttagaaaataagagacatcctgcagctgtctgttaaattcggttaagctttttttcaccccgtccgttaatgcaagcctggtttttgtcgtgccgccgggggaacggccgacgccgaggtcaatccggtttggatacagggcctcaagctggcgaaaggtttcagccactttaaatgggctgtattggggcagaagcacgccgcctgatccgacacgaatggtgtttgtctgtgctgcgatgcgggcgatcatgatttcaggcgctgtgcttgccagtcctttcgtgctgtgatgctcggcaaaccaataacgcttatagccccactcttcactaaatcgagcaagctcaaccgaatgctgaagagttgtcacagggccctctcctttagaaacaggagcctgatcaagtatgcttaaatgaatcaaaaggccgcttcctttctgtctgtttttagatggtgacaccagaataggcaaaatgacttgcccgcgtcaaatggtttgtttaagaagcgcactttatagcatttgcaaatcatatatcaaatatggaagttttttttcgaggtttttcgtcaattattcttaacttttacgaaactttgatataataacaaacgtatatattagtaatttacggcttattttccttgtgagcgtaaaaataaatgtgactatcttcacattttgatgagtaggagtgaatcgtgtggcaatttctttagaaaaaggtcaacgaattgatttaacaaaaggaaaagccggtctgtcaaaattgatggtcggtctcggctgggacccagtgtcctcaggcggagggttcttcagcaaactgcttggcggaggcggtccgaatatcgactgtgacgcttcagtgctgatgttggaaaacggaaaattcaccgataagaaaaacctgatttatttcggcaacctgaaaagccgctgcggcggtgtacagcatacaggcgacaacctgacgggtgacggtgcgggcgatgacgagcaaattatgatagatttagataaagtgcctgcaaacatcgataagcttgtatttgtagtaaacatttacgattgtgtcagaagaaaacaagatttcggcatgattcaaaatgcgtttatccgcgtagttgatcaatctaatcacgaggaaatgctcaagtacaatttgagagacaattacgccggcagaacaagcctgattacagcagaaatctaccgcagcggcagtgagtggaagtttgcggcgatcggtgaaggcacgaacgatacgagattagaagatattatcagccgatacgtataaaagaaaaggagtggatgaaacatgacaatttcattggcaaaaggacaaaaagtagatttaacaaaaacaaatccgggtctttcaaaggttgttgtcggtttaggctgggatacgaacaagtatgacggcgggcacgactttgatcttgactcaagtgtgtttctgttagacgccgcaggcaaatgcgcgtcaccaaacgactttattttctacaaccagcttgaaggcggcaacggttcagtcgttcattcaggcgacaacctgactggtgctggcgaaggcgacgatgagaatgtaaaagtaaatctcagcgctgtaccggcaaacattgataaaatctcatttgttattaccattcacgatgcagaagcgcgcagccaaaactttggacaagtatcaaacgcgtttgtccgcatcgtaaatgaagaaacaaatgaagagctcatccgttacgatcttgcagaagatttctctattgaaacggcaatcattgcaggggagctttacagacataacggcgagtggaaattctcagcaatcggctcaggctaccaaggcggccttgcccgcattgcaacagactacggtttgcaagtcggttaagacaaatacgaagagcagaaaggagagaggcagtatggccattcaattatcaaaaggacagcgcattgatttaacaaaaacaaatccgggactgactaaagcggtgatcggcttaggctgggatacaaacaagtattccggcggacacgattttgacctggatgcttcggcctttttagttgatgcgcatgataactgcgtaaatgatctcgatttcgtcttctataataaccttgaacatccgagcggcggtgtcatccatacgggtgacaaccgcacgggtgagggcgacggagatgatgagcagattatcgttgatttctcgaaaatccctgctcacattgagaaaatcggcatcacagtgaccattcacgacgctgaagcacgcagccaaaactttggacaagtttccaatgcatttgtccgcgttgtggatgaagaaacgcagaatgagcttcttcgcttcgatttgggagaagacttctccattgaaacagctgttgtcgtttgtgagctttacagacacggcggcgagtggaaattcaatgcgatcggcagcggattttccggcgggctggctgcattgtgccggaattacggtttgcaagtgtaagcgagtgacaaatagagaagtcaccgtttcaaattaataggaggaaaaaacttggactttttacatcatattttgtctacgtatgcttcatttttcgattggaaaatgtggggggaagttctgactgatcctgtttcctggggtttgatcggttcccttgttgttctggaaggccttttatcggccgataacgcgcttgttcttgcggtcatggttaaacacctgccggaaaaacagcggaaaaaagcgttaacgtatggtttgtttggagcttatattttcaggtttattttcatcgggctcggtatgcttctcattaaattctggtggatcaaggtgcttggcgcgctttacctggcttggctcgtcattaagcacttctggattggcgaaaaagaagaggaagcggacggcatcaagaaaaactcttggatggtccgcacgttcgggatcttctgggcgactgtcatttcagtagaattaatggatcttgccttctctgtggacagcatcctagccgcgtttgcagtatctgaaaaagtatgggtgcttctgatcggcggtatgcttggtattttaatgatgcgtacagtggcaaaagtgttccttgtgctgattgataaaattcctgagctggaaaacacagcattcgtgttaatcggcattatcgcgctgaaaatggcggggagcgctttccattacgaaatgccgcactctgtattcttcattatcattatcgctgcatttgcggtaacattgatcattcactacatcaataaacaaaagcaggtgcgcgaacaaacagccgcttcaaaagaagaataaaacaaaacaaggagggaggttcaatgtccttccttttttgttaccgaaatatcgttcaatgacaaaccggaaaggaggatatgatgagacaagaagaactaaccattcataaagcacttccggctgatggcgattggaaaagcctgctgtttcagccattgccggagcgggatcactatgaaactgcacaaggcctttctttttctcgtcttgccggtcagatattgggcacgcctattgatgagacggactactataacgagctatatgagctgtctgtaaacgaccgcataacgattttgagtgaaacgcttgataaaacaatcgaaccggaaacatttcaaaagcttcagcatattcattccatcaatcagaaagaaaaagggctgtcagtcagccgctttgttgcctttctggacggggaaaagctgattgcgaagcactcaaatcccctgatgcaccgccatttaagaaaagcgctgatgacgcttttacatacctttgcggacagtcatgaaaaggggctgaatcatcctgattttcgcagagtgctgcttgatgtctcgaagttttccttaaaccatctgaacccttggctggaaaaaaccgatatagagcgggagatgccgaaggttgtttggtatggagatgcgacgaaaagccagctctatttcttatattatctgatgctggtcggctgtgatgtactgctgttccatccggcgggaacggatcagctggcgcttgtcgacccgaagcaggagctcggttttacggaaaagctcccggatgtttcggagcttcagccgttcccgaaagaaaaaccagaccggaaatcaacagtggcttaccgctcaacaaaggaaattgaacatgtgctgaatcacgaggaatccatgctgtataagccgtggcagttcagagatcacacaccggtgtccgttacgctgaaaacgacctatgatgaattgtttttaatcacgaaagaacgcgcctttattcggccgaatttcaaagctgataaacattcaattgagattccgaatgtattcgccaaaattatgggcgtgtcgaaagacaataaggaatattggaacaggcttcatactctagcggattatcaggaaacagaaatggtcagaagctttccatttacagaagaaataaagtcgaactatcaatttcactacagccacgcacttgatcaagaagggaacattgatccggacaagctgatggcaagcaatgtgtggcagtacaaacagctgccggcgggcgttcagactgccattgccaaaacgatttcgagaatgtgcaggcacccgcggcttaaagctttgcatcaggaacaagtcaaggatgttcaaatctatttgtttaaacaaacaacaaatctgcctgctaatctgctgaaattgattcaaatgttcgactatgcgcaaaccgttccgaaactcgttttatatcatacggaaatgagcggcggactcacgcgttcggatgctgctgccctgctgttcctgaatgaaattggaatcgatatcatcatttataatccgcccggacaccaagatattgagcagtttattgaagatgaccagtatgatatccactggctggatgacatggtgtttcagcaggactacaaagagccttcgcttgtgaaaaggctcttcagaaccattacccaaaaataaggagagaagaaaagcatgacaacagaaaatcaaaatccgcttgttctcgataaaaatgaagagatttcccagcaaaaagctgacgatatccgtcttcagcttcgtcaggaaccagaagtgaagcggcttgctcaacaaattgacgtcaaaaaccaaatggagctgcttgagtacggcaaggagccggccgttgaaatatccaagttctctgaccgcatcttagggatgatgaaaacaacaagcgtgacagactccggcacaatgctgactcagcttgggaaaatcatggaccgcttcgacaaaaatgattttgatgagccaaagggattaatggcgaaaattttcaaacgcggcggcagcatgattgaaaaaatctttaaaaagtatcagacgcttggcggagagattgaaaaaatccacgttgagatttcaaaatacaaagatgagatgacgaagacgaactacacgctcgatgaaatgtatgaaaacaatatcaaatactatatggagcttgaaaaatacgtcgttgccgggcagatgaaactggaagagatgcagtcgatccttccttcatatgaggaaaaagcggcaagcgggaaccagctggcgcaaatgcagctcgatacgttgcgcaacggcattcaggcgcttgaggaacgggtgtatgatctggatatggcacggatggtggcgcttcaaactgctcctcaaatccgtctcctgcagcgaggaaatgcaaagctgatcgggaaaatcaactccgcgtttatcattaccattccgattttcaaaaacggcattattcaggctgttacggtaaagcggcaaaagcttgtggctgattccatgagcgagcttgaccgccggacaaacgagatgctgaaacgaaatgctgaaaacatctcgagccaaagtgttgaaattgccagaatggccggcagaccgagcatagatattgaaacgatcgaatcgtcttggaacacgattgtcagcggcatgcaggaaacaaaacaaatcgaagaagaaaacaagcgcctccgcgaagacggcgcgagacgaattgcacagcttcaggataatattaaaaaagcagcattgcagcaataagaaaaaccccgcttgtggaacataagcggggtttttcaattacatcatttagttaatgacaatgtgtaaagacaggtgtaaacttaaacggtaatcattttgcatatcagaggtgttggcaatgggaaaacaacagcctatatcccagcgtaaactgctgggcgtcgccggtttggggtggctgtttgatgcaatggatgtcggaatattatcgtttattatcgccgcgctccatgtagagtggaatctgtcgcccgaggaaatgaaatggatcggaagcgtcaattccatcggcatggctgcgggtgcgtttttgtttggtttgcttgctgatcgaatcggccgcaaaaaagtgtttatcatcacccttttatgcttttccatcggaagcggcatttccgcttttgtgacgagcttatcggcatttctaatccttcgtttcgtgattggtatgggacttggcggcgagcttccagttgcttcaacactcgtttcggaagcggttgtgcctgaaaagcgaggcagagtgattgtgcttttggaaagcttttgggccgtgggctggctcgcagcggccttgatttcttactttgtgataccaagctttggctggcaggctgccctgctgttaactgcgctgactgctttttatgcgctgtacctgcggacgagtctgcctgattcgccgaaatatgaatcgctttctgccaaaaagaggtcggtgtgggagaatgtaaaaagcgtctgggcaagacagtatatacggccgaccgtgatgctgtcgatcgtttggttctgtgtggtgttttcttattacggcatgttcctatggctcccgagtgtcatgctgctgaaaggcttcagcatgattcaaagctttgaatatgtcctgctgatgacgcttgctcagctacctggctatttctctgccgcatggctgattgaaaaagcgggccggaagtggatactcgtcgtttacttgattggcacagcaggaagcgcctatttcttcggaacggcggattccttaagtcttctgcttacggctggaatgctgttatcgtttttcaatctcggtgcatggggcgtgctgtatgcttataccccggagcaatacccgactgcgattcgagcaacaggttcaggaacgacagcagcgtttggaagaatcggcggcatcttcgggcctttgcttgtcggaacgctcgcagcccgtcatatttcgttttcggtcatcttttcaatcttttgcattgcaatcttactcgcggttgcttgtattttgattatggggaaagaaacgaaacaaactgagctagaataggaaaagcacctcttgaatgaggtgctttcgcgtgtcgacaaaccctcgcattcgttgtcaggactgcgcttcggtgctcaatgcgaagtggatcaacggctaaattctcaggcgtcctgcctaaacgccgtcgtcatcacatcctgtgaatgtccgctcctatgctcgtccttcctagacttcaagggttttcaatcacgctgaaaaaatgacaaaattctaaaatgaaaaccattttagaattttgtcaacaatctgaggtacctctgaatgaggtgcttttttacaattgcgcccgggctgcggattggcgtttcccggttttactaattgtctggtagagcgtcatagaaagtatgaacagaatggcagtaaatcctgtgacagctccgaaatgctgtgtgctttgatataaaaaacctgcaatacttgtaccgacagtggttccggcatacatagcggcattggaaagggaagcaatggttcctcgcgcatttggtgcaatggattgaaagacacccatcattaacggaaagatgatgccagctgtaaagaacgtgagaaaaaagccggcttctactaaaaacaagtttggaaagaacggaagagcgaaatagagagcgcccattagcagcatcccgctgatcagtgttttaaacatgcccagcttttctgaaacccggctgccgataaggctcccgagcatatttcccagtccgagtacaagcatagctgcgccaatttgtgacacggttaaatgataatccgcggaaagccaagtacccagaaagctgaacgatgcgaagtttccggtttgaaacagaaaataggcaagcagaatgaccgatgttttcggcaatgaaaaaagctcccgataggggttgacaattgatgggcgcgccaatggttcagaaggccggatgccaggcatgaccgccgccaggatcaatagaagaataagcgagcacgctgacaaaacgaaaaatggcgtatgccatgtaaaggaagcgagaaaccctccaataggaagtccgagcatttgtgaagcggccaaacctgctgtcgcaatccccatgccttttatgatctgagaaggctggacaatgactgggatggacgcccaaatttgaggcgtcacaaacgcagcgctaacgcctgcggcaaaacggaacaggcacatggcggcaaaagagggagcgatgccgcataaaaacgtggatacaataaagcctgcaagtccccacagcatgactgttttcctgttcagccggtctgagattgggcctgcaatgaaagcgaagagcgcataaccgagtgcataagcactgaccatccagcctgacaaatcagtagagacatgaaactgatcctgtaaaagggggagaagcggcgaaagcaaaaaggtatccgtgccaatgacaaacatgacactgaagaaaagccaaatgcgattcaaatttatcactcctattgttttataactttgaaactatgaaacagatatgtatagagaaaaccctttgttagagggtttccaaaaagccaggcaggtatgtttgaaatgtgtcttcacgcagactgacgtattttgtccgcgaatctttccgggttgccgtcaatcccgcttcacgcagcgttttaaaatgataagatgccgtggttttgacaatattgcacttttcacctacttcaccgcagctgagttcttttccgctgacataaagcgtacgaataatggcaagccttgattcatcagacagtgctttaaaaatttgcgctctgatttgatcatctgattgtttcatagtcatgaaactataatacataatgggtgttgaaaaagcaacttatttttccagtaaaggagcaggaagtcataagaggaaggaggaattcaattccaataaaagcgttttcaactaaagataggcgaaaaatcacccgtaaaatacaatcatataggaggattacagagcatttagaagcataaataagatcatgtggtcacatggatgtttataaagaaatggtacagaataaaagagaatatgctgtttgtgtaggaagttacataaatgttacggtaataaagattgcttaatatggagggaaaatatgagtgtagatgagaaaccaattaagataaaagtcgagaaagtctctaagatttttgggaaacaaacaaagaaggcagttcaaatgcttgccaacggaaagacaaaaaaagagatcctgaaagcaaccggatcaaccgttggggttaatcaggcagattttgaagtatatgatggtgagatatttgtcatcatgggtctatcagggagcggtaaatcaactttagtacggatgttaaaccggcttattgaaccgactgccggaagtatttacattgatggtgacatgataacaaatatgtcaaaagaccagctccgggaagtccgccggaagaaaatcagcatggtcttccaaaagttcgctctgttcccgcacagaacgatacttgaaaacacagaatacggactggagcttcaaggtgtagacaaacaagagcggcagcaaaaagcgcttgagtctcttaagctcgttggactggaaggatttgaacaccaatatcccgaccagctttccggcgggatgcagcagcgtgtcggccttgcccgcgcgttgacaaatgatccggacatccttctgatggacgaagcgttcagtgcgcttgatccactgattcgtaaagatatgcaggatgagcttcttgatcttcacgataatgtcggaaaaacaattatctttattacgcatgacttggacgaagcgttgcggatcggcgacagaattgtcctaatgaaggacggcaacatcgttcaaatcggcacgcctgaagaaatcctgatgaatccatctaacgaatatgttgagaaattcgtcgaagatgttgatttgtctaaagtcctcacagcaggccacattatgaaacgcgctgaaacagtgcggattgataaagggcctcgcgtagcattgacactgatgaaaaaccttggaatttcttcaatttatgcagtggataaacaaaagaaattattaggtgttatctatgcgtctgatgctaaaaaagcggctgagtctgatttgtcacttcaagacatcttgaatacagaatttacaactgtaccagagaatacgtatctgactgagatttttgacgttgtgtccgatgcgaatattccaattgcggttgtggatgagaagcaaagaatgaaaggaattgtcgtaagaggcgcgctgattggcgcacttgccggcaataacgagtatatcaatgctgaaggcactaacgaacaaacacaagatccttctgcacaggaggtgaaataagatggatagactgcctagaatacctttagcagatattattgaccgttttgttgactggattacgatgacgtttggcggattcttcgacggaatcgctaacggattggccgcttttgtaaatggaattgtcaccggtcttggatttattccatctattttgttaacgattattttcgccgcacttgcgtggtggatcagtacaaggggaattgcgttatttacgttgattggattcctcctgatcgattatttaggatattgggacccaatgctgcaaacattggcgcttgttttgacatctgtgattatttcgattgtggtcggggttccgatcggaatttgggcgtctcagaaagaaacggttcgccgtattgtaacgccaattcttgatttaatgcagacaatgcctgctttcgtatatctattgccggcgattttcttctttaacatcggtgttgtgccgggtgttgttgcatctgttatcttcgcgatgccgccgacaatccgcatgactgttctcggtattaaacaagtgccggcggatttgattgaagcgactgaggcattcggttctacaacagttcagcgtttgtttaaagttcagcttccgcttgcgacaaaaacgattttggccgggatcaaccagagcatcatgcttgcattatcaatggttgttatcgccgcaatggtcggtgcaccgggacttggttctgaagtatacagtgccgttacacagctgaaaaccggggtcggagtagaggccggtatcgccatcgttatcgttgccattaccctggaccgtattactcaaaatattaaagtgaagaagaaaagcagggggaatgcctgatgcttaaaaaaatcatcggcatcggcgtttccgccatgctggcgctctcacttgcggcttgcgattcagaaaacgatgaaaatgcatccgcagcagaacaggtgaataagaccatcatcgggattgaccccggttcagggattatgtccctgactgacaaagcgatgaaggattatgacctgaatgactggacattgatttcagcgtcaagtgctgcgatgaccgctacgcttaaaaagtcatacgaccgtaagaaaccgattatcattacaggatggactccgcactggatgttctccagatataagctgaaatatctcgatgatccgaaacaatcttatggcagcgcagaggaaatccatacgatcacacgcaaaggcttcagcaaagagcagccgaatgccgcaaagcttctgagccagtttaaatggacgcaagacgaaatgggcgaaatcatgatcaaggtggaagaaggcgagaaacctgccaaagttgctgctgagtacgtcaataaacacaaggatcagattgccgaatggacaaaaggcgttcaaaaggtgaagggagacaaaatcaaccttgcctatgtggcgtgggacagtgagattgcaagtacaaacgtcataggcaaagtcttagaagacttgggctatgaggtaacacttactcaggtagaggctgggccgatgtggactgcaattgcgacgggaagtgcggatgcatcactttccgcatggctgccgaatacccataaagcatacgccgctaaatataaaggcaaatatgacgatattggcaccagtatgactggtgtgaagatggggcttgttgttcctcaatatatgaaaaatgtcaactcaattgaagatttgaagaagtaatcaaaaaagcagcctgtgtcaggctgctttttttgcgttattttacgtaagcggcagcgggtgaatcagccttttgaaaagtttttaatacggcattcgctaaaatatgaatgccggtaaacatcgcgtttcggtcaaaggtcatgtgcggatgatggagccccggctggagcccgcagcctagtccgagcatcgttgttttcagattcggcaccttcacggcgtaaaaatggaaatcctctccgccggtagtgacaagcgggtcatcaagccgctcagccccgatgatatctgtaatggcttctgccatgatcgcttcagcttctttgttttgtgttgccgcaggaaggctgtgttctttttgcagctcgatttttgcgccgaatgcagcggcggccgcttcacaggctctttctgtctcggcgattaacgcctccatggcttcattggtctgtgcgcgcaaatcaaggctgaacgatgcttttcctggaatgatgttagagctttcaccgccggcttgaagttttgtcattttgacggtatgcgggatttgcgggtcaatatgaatgagtccgagcttatgtacaagaaatgccgcaatttcaatgctgttttttccgagatgcggacgggcgccatgagcctcttccccgatgatcgttccctcaatgtgctggcttgatccgtgcagaatagacggagcgcagcggccgttctgtgtttcctgaatcgggcggacgtgaacgccatacaaatagtcgatatcatcaagcacgccttcttctatcattttcaaggcgccgccgcctttttcttctgccggctgaaagataaaacggattgtgcccttcggaagctcaggttgtttttttagcagcattaatgtgcccaatgccattgtcatatgtgaatcgtgtccgcaggaatggttggcgcgaaatgtgccgttaacctcctgccacagcgcgtcaatatcagcgcgtaccgctacaacaggtgagcctgagccgatttcgccgacaaccccggtgcagtctgaaaacgtgcgcgtccggcaccctaaatcctcaagcttttgtttcaaaaatgaagttgtctcatattccttccagctgacttcagggttcgcgtgcagatgctcgaagatgtccataatggtttgtttcatgtcttctgaaagcttttgcatggtaagaaatacctccttctatcagaatgaatttttaccttctttactttatttatattgaaacaggaagataggctgtatataatatagcacatattgctactattcagaataattaatattttcaaacagaggggatggatcgaaatatgagtatgccagcagccgaaacacagcctaagaaaaaacgaatgacatttaaaatgcctgacgcttatgtcctcttatttatgattgctttcatttgcgcaatcgcttcatatattgtgccggcaggtgaatttgaccgcgtgacaaagggggatgtcacgaccgctgttccgggaagctatcattccattgaacagtctccggtcagcttgatcagcttttttacttctctacaggatggaatggttggatcagcacccatcatctttctgattctattcacaggcggcaccattgctattctagaaaaaacgggtgccatcaatggcctgatttacaatgtcatcagcaaattccgcacaaagcaattattatttatttgtattgtcggcgcattgttctccattctcggaacaaccgggattgtcgtgaattcagttatcggttttatccccatcggcctcattgtggcacgatccttaaaatgggacgcagtcgcgggagccgctgttatatacatcggctgctacgctggatttaactccaccatattatcaccgtcaccgctcggtttatcacaatcaatcgcggagctccctcttttctcaggaatcggcctgcgagttgtgatatacatatgctttttgctgtcttctattatttatatctatttgtatacgagaaaattaaaaaaatcaaaagatgccagtgtgttaggaacagattggttccctgcggcaggaatgggcgaagccggtaaagaagaagatcagtcagtgccgtttaccgttcgccataagctgattttggctgtggcgggactctcacttgtcggatttttatacggcgctttgaagcttggctggtcagattcccaaatggctgcgacatttatttttatttctgtccttgccggtttaataggcgggcttgcggcgaacgatattgccaaaaccttcattacgggctgccaaagtcttgtatacggggcgctgattgtcgggatggcacgaagcatttccgttatccttgaaaatggaaagcttctcgatactgtcgtcaatgctttggcttcacttttggatggattcagcccgattgccggggcaatcggcatgtatatcgccagtgcgctgcttcattttctcatctcttcaggttctggcgaagccgttgtatttattccaatactggcgccgctcgctgatttgatgggaatcacgagacaggttgcggtggaggcagttatgcttggagaaggggtcgtcaactgtgtgaacccgacatccggcgttctcatggcggtgcttgccgccagcggtattccgtatgtcaagtggctgcggtttatggtgccgcttgctctgatttggttcttgatcgggcttgtctttatcgtgatcggcgtcatgatcaattgggggccgttttaacgattgctgcccgccggcttgtacggcgggcttttgagttattcattgcagaagcgcaggctgttattgtaacatgtaagccataagccattcgtaaaagtgcgggaggaaggtcatgaataatctgcgtaatagactttcaggcgtgaatgggaaaaataagagagtaaaagaaaaagaacaaaaaatctggtcggagattgggatgatagcgggagcatttgcgctgcttgatgtgatcatccgcggcattatgtttgaatttccgtttaaagaatgggctgcaagccttgtgtttttgttcatcattatcttatattactgcatcagggctgcggcatctggaatgctcatgccgagaatagacaccaaagaagaactgcaaaaacgggtgaagcagcagcgaatagaatcaattgcggtcgcctttgcggtagtggtgcttacgatgtacgacagggggattccccatacattcttcgcttggctgaaaatgattcttctttttatcgtctgcggcggcgttctgtttctgcttcggtatgtgattgtgaagctggcttacagaagagcggtaaaagaagaaataaaaaagaaatcatcttgaaaaatagatggtttctttttttgtttggaaagcgagggaagcgttcacagtttcgggcagctttttttataggaacattgatttgtattcactctgccaagttgttttgatagagtgattgtgataatttaaaatgtaagcgttaacaaaattctccagtcttcacatcaggttgaaaggaggaagcggaagaatgaagtaagagggatttttgactccgaagtaagtcttcaaaaaatcaaataaggagtgtcaagaatgtttgcaaaacgattcaaaacctctttactgccgttattcgctggatttttattgctgtttcatttggttctggcaggaccggcggctgcgagtgcagaaacggcgaacaaatcgaatgagctaacagcaccgtcgatcaaaagcggaaccattcttcatgcatggaattggtcgttcaatacgttaaaacataatatgaaggatattcatgatgcaggatatacagccattcagacatctccgattaaccaagtaaaggaagggaaccaaggaaataaaagcatgtcgaactggtactggctctatcagccgacatcgtaccaaattggcaaccgttacttaggaactgaacaagaatttaaagaaatgtgtgcagccgctgaagaatatggcataaaggtcattgttgacgcggtcatcaatcataccaccagtgattatgccgcgatttccaatgaggttaagagtattccaaactggacacatggaaacacacaaattaaaaactggtctgatcgatgggatgtcacgcagaattcattgctcgggctgtatgactggaatacacaaaatacacaagtacagtcctatctgaaacggttcttagaaagggctttgaatgacggggcagacggttttcgatttgatgccgccaaacatatagagcttccggatgatgggagttacggcagtcaattttggccgaatatcacaaatacatctgcagagttccaatacggagaaatcctgcaggatagtgcctccagagatgctgcatatgcgaattatatggatgtgacagcgtctaactatgggcattccataaggtccgctttaaagaatcgcaatctgggcgtgtcgaatatctcccactatgcatctgatgtgtctgcggacaagctagtgacatgggtagagtcgcatgatacgtatgccaatgatgatgaagagtcgacatggatgagcgatgatgatatccgtttaggctgggcggtgatagcttctcgttcaggcagtacgcctcttttcttttccagacctgagggaggcggaaatggtgtgagattcccggggaaaagccaaataggtgatcgcgggagtgctttatttgaagatcaggctatcacagcggtcaatagatttcacaatgtgatggctggacagcctgaggagctctcgaatccaaatggaaacaaccagatatttatgaatcagcgcggctcacatggcgttgtgctggcaaatgcaggttcatcctctgtttctatcaatacgccaacaaaattgcctgatggcagatatgacaataaagctggggcaggttcatttcaagtgaatgatggtaaactgacaggcacgatcaatgccaggtctgtggctgtgctttatcctgatgatattgcaaaagcgcctcatgttttccttgagaattacaaaacaggtgtaacacattctttcaatgatcaactgacgattaccttgcgtgcagatgcgaatacaacaaaagccgtttatcaaatcaataatggaccagagacagcgtttaaggatggagatcaattcacaatcggaaaaggagatccatttggcaaaacatacaccatcatgttaaaaggaacgaacagtgatggtgtaacgaggaccgaggaatacagctttgttaaaagagatccagcttcggccaaaaccatcggctatcaaaatccgaatcattggagccaggtaaatgcttatatctataaacatgatgggggcggggcaattgaattgaccggatcttggcctggaaaaccaatgactaaaaatgcagacggaatttacacgctgacgctacctgcggatacggatacaaccaacgccaaagtgatttttaataatggcagcgcccaagtgcctggccagaatcagcctggctttgattacgtgcaaaatggtttatataatgacgcgggcttaagcggttctcttcctcattgagggcaatgctagaggggacttaccgaaagaaaccatcatagatggtttcttttttgttcataaatcagacaaaacttttctcttgcaaaagtttgtgaagtgttgcacaatataaatgtgaaatacttcacaaacaaaaagacatcaaagagaaacataccctggaaggatgattaatgatgaacaaacatgtaaataaagtagctttaatcggagcgggttttgttggaagcagttatgcatttgcgttaattaaccaagggatcacagatgagcttgtggtcattgatgtaaataaagaaaaagcaatgggcgatgtgatggatttaaaccacggaaaggcgtttgcgccacaaccggtcaaaacatcttacggaacatatgaagactgcaaggatgctgatattgtctgcatttgcgccggagcaaaccaaaaacctggtgagacacgccttgaattagtagaaaagaacttgaagattttcaaaggcatcgttagtgaagtcatggcgagcggatttgacggtattttcttaatcgcgacaaatccggttgatatcctgacttacgcaacatggaaattcagcggcctgccaaaagagcgggtgatcggaagcggcacaacactagattctgcgagattccgtttcatgctgagcgaatactttggcgcagcgcctcaaaacgtgcacgcgcatattatcggagagcacggcgacacagagcttcctgtttggagccacgcgaatgtcggcggtgtgccggtcagtgaactcgttgagaaaaacgatgcgtacaaacaagaggagctggaccaaattgtagatgatgtgaaaaacgcagcttaccatatcattgagaaaaaaggcgcgacttattatggggttgcgatgagtcttgctcgcattacaaaagccattcttcataatgaaaacagcatattaactgtcagcacatatttggacgggcaatacggtgcagatgacgtgtacatcggtgtgccggctgtcgtgaaccgcggagggatcgcaggtatcactgagctgaacttaaatgagaaagaaaaagaacagttccttcacagcgccggcgtccttaaaaacattttaaaacctcattttgcagaacaaaaagtcaactaaccgcaactttagagtaaagggctgattgtcaatgtgggagcagttgtatgatccgtttggaaacgagtatgtgagcgcacttgtggcgctcactccgattctcttttttcttttggctttaactgttttgaaaatgaaaggcattcttgcggcatttcttaccctagccgtcagtttcttcgtctccgttttggcatttcatatgccggttgaaaaagcgatttcttctgttttgttaggaatcgggagtgggctgtggcctattggctacatcgtcctgatggcggtgtggctgtataaaatcgcagtgaaaaccgggaaatttaccattattcggtccagcattgccggcatttcgcctgaccaacgattacagctattattaattggtttttgttttaacgcgtttttagaaggcgcggccggttttggtgttccgattgcgattagtgcggcgctgctcgtcgaacttggttttaaaccgttaaaagcggcagcgctctgcttgattgcaaacgcagcctccggagcctttggggcgatcggaattcctgtcatcacaggggcgcagattggtgatttgtctgctcttgagctgtcacggacattaatgtggacactgccgatgatctcatttttaataccattcctgcttgtattcttattagaccgaatgaaaggaatcaaacagacatggcccgctcttctggttgtgagcggtgggtatacagcggttcagacactgacaatggcggtgctcgggccggaattagcaaacattttggctgccttattcagcatgggcgggcttgccctcttcctccgcaaatggcagccgaaagagatttaccgcgaggaaggggccggcgatgctggtgagaaaaaggcataccgtgccgctgacattgcgaaagcgtggtctcctttctacattttaactgcggcgatcaccatctggagccttcctgccttcaaagcgcttttccaagaaggcgggctgttatatcaatcaacgctcctgttcaaaatgccttttctgcatcagcaaattatgaaaatgccgccgattgcgccatctgccatgccgttagatgcagtctttaaagttgatctgctgtcagcgactggtacagcgattttagcggcggtcatcgtgacagggctgttcagcaaaaagttctcctcccgggatgcctttgcttccctgaaggagacaggaaaagagctgtgggtgccgattatgacgatctgcttcgtgatggggtttgccaatctggccaacttcgcagggctcagctcttcaattggattagcattggcgaaaacaggagacctgttcccgtttgtcagtcctgttcttggctggattggcgtgttcattactggttctgttgtcagcaataatgctttgttcggtcatttgcaggttgtcaccggagcgcagatcggtgcgggttcagacttgctgttagccgcaaatacggcgggcggtgtcatggcgaaacttgtttctcctcaatctatcgccatcgctgccgcagcggtcggccaaacaggcaaggaatctaaactgtttaaaaagacagtggcgtacagcctgattctgttagtgattatttgtatatggacgtttattcttgcaagatttggagtgtaatagaaaagagcagtacatgcccagcatgtactgcttttttatgttaatttgctttctttgtcatttcggctgttgttttcactctggctttccccataaataaaatggtaaccgccgcgaggacaattggaatcaaagcgagcaaaaacacatacgtaatacttgatgacatcgcgtcaataatgcgattcaggatcgcatcaggaatctgggaacgtgttccagcttggaatatctcctgcgggtcgccaatattttgcgcagcacctgatcccgctgagcctttcatcccgctgaaggcgtcggtcagcttgttcgtgaatacgtttgtttgcaccgttccgaaaatggtgacgcctaaggtcatgccaaatgatcgcaaaaatgaatttgtagagtttgccgttccccgaaagcgaggttcaagatcattcatcgatgccgccggcagcagggagaagttaaagcctacaccaaagcctgaaatcatcataaagactgtcagccatacccgtgctgtgtcaggcgtcatattggaaagaagcagcatgccgataaagaaagctataacagatatcagcatcaaattgcggaagcttgccttcgtttggaagatcccgccgatcatgcttccgatgactgatccaatcatcatcggcgtcagaatgaagcccgcgcttgtcgccgagctgccgtagaccgcctgaacgaaaatcggaataaataccgctaaaataataaatgttccgccatacaggaaagcgagaatctgtgctgtggcaaacaagcggttcttaaacatccagaaagaaataatcggctcttctgcttttctctccacaataaaaaaggcaatgaagaaaacggcgaatacaataaacagcccgatgatctgaatggaattccaatcgtatgttttgccgccaagctcaagggcgaacatcaggcatacaatggatacgactaaggtaatcgcgccgccccagtctattttctgctttctgtgctccagagattctttgtagtagcgaataatgaaaaacaatgacaatgcgccgatcggcacattgatgtaaaacacccagtgccagctgatcgaatctgtaatgatcgcgcctaagagcggaccaagaacactggataatccaaatacagcaccgaacatgccggacatttttccgcgtttttccggcggaaacaaatcaaagataatggtaaaggcaatcggcaggagcgcgccgcctccgatcccttgaatggcccggaagatgatcagctgattcatcgtctgggcaatcccgcataaagcagaaccgattaagaaaaaaataagtccaaacaggaaaaaacgttttcggccgtacatatcggaaagcttgccgtaaatcggcatgccagccataaccgccaccatataggatgccgtcacccatgcaaatttatcgaaacttccaagatcggctacgatattgcccatcgcggtggcaacaatcgtattgtccattgcagacatcaagatgcccagcaggagaccgaggaccacaaatttggtggaagcctgttttgctgttgttgtgtccatttgttctacctcctcttacttttctatgtaagttctgatatcatgataatagtttgattgttgaatatctcgattatcaagataaactcgattttatagggaggactgtcagttgtcaacaagaaattccagaagtgagttggaaaagactgctgttcagctttttcgaaaactgggcacaagaacggttctgtttcatcaggcagccgctcaagctctcggtctgtttcccaccgatttgaaatcagctgacattttaaatgaagcagggccgatgacggccggagaactgggaaaaaaaaccggcctcagcacggggtcagtcacggcgcttgttgaccggctggaaaaagcggggtatgtggctcgtgaaaaggacccgaatgatcgcaggagagtcgtaatcgtccctttgactgcttcgaaaaaacatataaaggatttgttccgtcctctgtctgagtcaacgatggatttgtgccgcgaatatacggaagaggagctggaactcattttcagttttgtaggcaaagccgccgatattatggaggaagagcttgaacgtctgaaacagtaagtgaatttgtgcatagcttggcccgttcccgaataaattgtacaagttacataagagaagggagtacgggccggtgaacatttttttgagctatattgtgctgggactgtccttgtctgcgcctgtggggccagtgaatgcggcgcaaatagacaaaggaattaaaaacggtttttggcatgcatggattttcggtttaggcgccatgacagcggatgggctgtacatgctttttatctatttcgggctgtcacagtttttgaccgctccatttgtgaaaacgtttttgtggctcttcggcttttttgtcctgacctataccggaattgaaacgcttaaaaacgtcagagaaccgatggatgtgcgaagctcgcgggggaaaccgtcatacaggaaaacattcgcatcgggttttctcatttcattgtcaaacccattgagcatccttttttggcttggaatttacggaagcattcttgcgaaaacagcagaggcctacaatatgaatcagcttctaatctatagctccggcatcatgatcggcattttaatctgggatttctgcatggctatcacagccagtacgttcagaaacctgcttcatgaaaagctattgagaggattgaccggaatcgccggtgtatccctccttgtgtttggcttttactttggttatcagggcatcaaacagttattgggctgattcatgaaggacagtcacctgccgcttccagttttaatatagtatccagatgatactggaggtggatcaatggtgaatgggatttacaccaaaagttttctggaacgtattcaggaagagcttcctgaatggcaaagaatcgcttttgagctgctggcagaaactctgggggacgacgcggatacgtttccgtgcattcccggacgccaggcgtttctgactgatcagcttcggattgcttttgccggagatccgcgggaaaaccgcacagcggaggaactggctccgttgcttgcggagtacggcaagatatcgcgggacacgggaaaatacgcatccctcgttgtgttgtttgatacaccggaagatttggcggagcattattcgattgaagcgtatgaagagctgttttggcgctttttaaatagactgagtcatcaagacgaaaaagaatggccggaagacattccggccgatcccgagcattataaatgggagttttgttttgacggcgagccgtactttcttctctgcgctacaccggcgcacgaggcgagaaaaagccgaagctttcctttttttatgatcacgtttcagccaaggtgggtgtttgaggacctaaatggatcaactgcatttggccgtaacatgagcaggctgatccgatctcgtttagaggcctatgatcaggctccgattcacccgcaattaggctggtacggaggaaaagataatcgtgaatggaagcagtatttcctccgtgatgacgaaaaacaggtatcgaagtgcccgttttcttatttaaagaacatgttcaacaaaatgaaataaatcaaggactggcagggcgatctttatgaccctgctttttttgatagatcatggtaacgatggcgatgatcacgagaaaacctatgctgacgaaaaaaccgggccggcttgatttttcaaacaatgtaccggacacagccgcagcaatcagaaccatcgctaaataaatttgcgtttttcccatgccctcgggatcagtcagctttttgctggagaacaggataaacagccaagtgtataaaagcataagccccgcagctgttgtcatatgctcataaatgtttttaggcagcactaacgacagaataatggagagaacaagccccgcaaacgtcagcccaagtgccggccagcatatttttttgccttcctttagagtaaagcatttcggcgcgtcgccgtcatcagccatcgtacaaagcaatgtcgtaaccgcaaatagcgaagcgacaagggtcgagaacccggcgataatgaaaatcccgttaaatatatcaaggatgatctcaaggttgtatccttttaacgacgtaatgaacgggctgtcctgttctgtaaacttgtgtaacggaaccaaaagcagagccagcccgattgaaatgatataaataatcgccagcgttgccagcatcagtttccctgatttagacgcttcctcaggtttttttaagtgaaccgccatcagccccatgacctcaatcccgccaaaagcgtaaaacgcgtagattaaacctgtccacagccccatggcgccgtatgggaaaaactcactcgtcttatttggaacatgtatgccatgatttccgccggacaggataccgcataaagccaggatggcaatgacaataaacataaaaatagcagctgttttaatgactgccagcacgttttctgttttttcaaagacggacaggccggtgaaaataataaggagccccagtactgcatagattgaggcaaacacccatagcggcacttgaggaaaccaatgcttcgtaaatagcgaaatggctgtcagctggcttccggtaatcagcatttctgatgtccagtacacccagccgttgctgaagcctgcccatttgccgaatgcttttcgggcatacgcacaaaacgagcctttttccggctgcttcgccgatagcttggcgagctgttcaaagacaaaatacgtaccgatccctgcgatcagaaatgaaaggagaacggaaaaaccgctttttacaattgcgatgctggaaccgagaaagaagcctgttccaatcgtgcagccgactccgatcagtgacagctgccaccaagccagattcccttttggctggtctttttttgtttggctcattatttattcaaccccttttatctaaggttagattgtgatctgtccaaagcttatatacatcggatttttgcctctttttacatggagaaggaagcggacgctcatactaatgaaaaaaggagcaaaccaatgacacagcaatatattgtggagccgaaaaaagggcttgggctgaagctgaaaaagggtcagattttaaaggtggttgatgtagaagggcagcaggtggctgattttgtcgcataccatgccaaggatttttatgaacaccttgatcagggagcgacgatagacgccaatcactccattcatgtgaaggtcaacgaccatctctactccaacctgtataagccgatgttaaccctgattgaagatacggtcggcaagcatgatctgctgttgcccgcctgccgtcctgatatgaacaggctcttatatgggaagcaaaaggatgagtttcaggatacgtgctatgacaatatgaaccgtgcgcttgagcagtttggcgtaccgaagcctcacatgcattacccatttgcgatttttatgaatactgtccttgatgagaaagggaatctgtctgtggaaacgccgctttcgaatgccggagattatgtaaggctcagggcggagatggatttaattgtcgcgttttcttcctgcccgattgaaaaagggaaatgcaatggcgacagtgtgacatccatacgggttgaagtcagctgatctctcttgttcactgtgaatgaagacctgtgctatatttaatagggatacataacagtcatgattcattttcattgatttggggaaatgatcagtaacaagggaaaatgtacaggaggaatgattgggatgagcatgcaggaaaagattatgcgtgagttacatgtgaagccctcaattgatccaaagcaagaaattgaggaccgagtcaattttttaaaacaatatgtaaagaaaaccggtgctaaaggctttgtattgggaatcagcggcggccaggattcaacacttgcgggaagactcgctcagcttgcggtggagagcattcgcgaggagggcggagacgctcaatttatcgctgtccgtcttccgcatggcacacagcaggatgaagacgatgcccagcttgctttgaagtttattaagccggataaatcatggaagtttgatattaaatcgacagtcagcgctttttctgatcagtatcagcaggaaacaggcgatcagctgactgactttaataaaggaaacgtaaaagcaagaacaagaatgatcgcgcaatacgcgatcggcggccaggaaggccttcttgtgttaggaacagaccatgctgctgaagcagtgactggtttctttacgaagtacggtgacggcggagcagacctcctgccgctgacaggcttgacgaagcgccagggaagaaccttgctgaaagagctgggtgcaccggaacgcttatacttaaaagaaccgactgccgatctgctcgacgaaaaaccgcagcagtcggatgaaacagagcttggcatttcctacgacgagattgacgattatctcgaaggaaaagaagtatcagcgaaagtatcagaagcgctggaaaaacgctacagcatgactgaacataaacgccaggttccggcgtctatgtttgatgactggtggaaataagttgaagaaagcccgctctcggagcgggcttttgtcgtgtacagaagctttatttgatgcggatatgattcagcttgaccattaatctgtcggcgaaccttcggaggctgcctctcgtatcaggatctaatgggagttcggctctcgcggcaatgttctctgccacatcctgaatcgacaggttgtctgtttgaatgtggtcctcaaaaatgggtgatgataaaccttcaatgcagcggtcaatttgtttggcggcccaggagttttttccttctgctctggtgcgcagcctttttaacaaggtttcctttgaagccattagtgtaaagtggtgaacgatcctgccttcatgcctgagcctgccgatgatctcattgaagtattcaggatgtacaatcgtcataggcacaataatgatgccgcggtatgtatctgtcagagaagctagaaaactgtaattgaacgcccgccataagggatagctttgaaaatcgtcctttgcgatctcctgcggcaccatggagcgcagcgcaaaacccattttctcgggatcatacacgtaagatgggtttagccttctgtgcagttcgaaggctgtttgtgtttttccggaaccgaatgccccgtttatccaaatgatcatcgccatttctcccttcctattcatcatacagaaaaagacccttcaatcgaagagtcagctggaaaaacaataaaggcggaaggttttaacgcttttttgcgtcgaagtattaaaatacctgcagaaatgttgtacaatgaatgtcattcaggcaaaaatggctaaacaacaaagcgcactttaagcttggaccggtaaagccggtatctatataaatattcgttaaataagcatataatgaagataaaatttcattccttaggaggatttcgccgaagatgaacgctaaacgagccatcccagtaagagaaagaaatatcgtcctgatcggattcatgggtgtaggaaaaacaacaatcggccaattggtcgctaaaaaattatatagagattttattgatattgaccaagagatcgaaaaggatttcaatatgacaattcctgagatatttgagaaaaagggagaagactttttccggaaaacggagaaggaatatattttagacatctgccatcataaacgattcaaagtcgtatctctgggcgggggatcttttaaacaagaagaaatcaggaattgctgtctggaaaactgtctcgtgcttcatctggacctgtcatgggagaactggaagcagcgcgcggatttattgatcgaaagccgccctgtactgcataaccgttcaatggatgaaatggaacagctgtttaacgaaagaaaagtcatttatgacaagcacaattcaaaagtggcaacagacaacctttccccggaagaggttgccgattacattgttgagacattaaaaattggctgggatctttatcagccgatgtaaaaagccgtgcgcagcgcacggctttttttatcgttttatcccttgtatcaaaatcgcttttaaacaaaaggagatgggctgtccgttttggttcaatgtaatacagaacgtgtcgcgtgcttcgtctgatgcgtgattcaagtgggtaatgatttgtttttctcggtcagcgggggttccgcctcgtttgatccagctatcgtattgaatcggcaagttccacttttggatgtcttgataggccagttgattggcgctgaacatcgactgccattctgataatgagctttctcgaacatgggaagggtctcgaagccggttcaaatgattgacaaactcatcaagaatgggatcttcaggcgcgtaatgatcaactaagagaaaacgtccgtcctcttttagtacgcgtgcaacctcgctgacagctttgcggacatctgaaaaatggtgggctgcgtatcggcaggtgatgatgtcaaatgaatcgtcggggaaggggagtgactctgccgttccttgctgaaagcgtacgttttcagctcctttttcttgcgcgaaggaggacgcaacctcaaccatctctttcgtcgcatcaacaccgatgcactcctgtacataaggagaaaatgccagggccgtatggccggcgcccgctccgatatccagcacccgatgctctgcccggcattccgctgttttgatcatcaaccccaaatcttccccctcggcaaataccttttcatcccgatacatctcggcgtttttagaaaacggtgtttcattagtcatttgaaccagctccttcttttcgtaaatgatgatatggattatgttagcaatttctgttatgattcgtccaagatataaaaatgatgaaaacgataggttcaacctatggaggctgaaatggatattaaagtgatggaatatgcagcggaaattgcccagcgccaaagctttacaaaggcggcggaacatcttcatatcgcacagccgtctctcagccagcaaatcaaaaagcttgaggctgagctagggcttaccctttttcacagatcccatggctctgttacattgacaccccacggcaggcgtttcattgaaaaagccgaggacatcattcgttccagagatgatttgcttcgggaaatgcaggagcgatcacagggaatcggtcataaattatccatcgggattcctgctgtaacagggagatatctctttcctccgctgctgaagcagtttttggcgcgctatcctcatgtggaggttcagcttgttgaaaaagattcggtttcattagaggagatgacggcaaagggagaagttgacctttctgttttatccttgcccatcgaggatgaacggctctccattatacccttgctcacggaaccagttgttctcgcagtgccgaaggaaaaacaaaggtggatgccgccggaaatggtcgcgctgattgagaaagcgctggaagaagatgagggacaccagccgtgtgtgccgcttgacatggtaaggaacgtgccatttattctgttaaaagaaggcttcggctttcgcaggacagttctcgatctctgtgcggaaagcggctttaagccgaatgctgcctttaagacaagccatattgaaaccgcccaatctcttgtggctaacggattaggtgtgacaatggcaccgaatatggtcagaagggataaagatccgggtgtgatctatttattgattcaatccgcgccatcacgaaccctcgtcttcgtctttttaaagaaccgctatgtcagtctgaccgcccaggcctttatggaactaacccgggaaagtcttaaacaaacgtttgatgaaggctgtctgggaaacaaagatgaaaatatttagaaaacaaagccgaaacgtggtagtataggaatacaaactaaatcttataaaacaaaggggaataatcggaaatgcaactattcgatctgccgctcgaccaattgcaaacatataagcctgaaaaaacagcaccgaaagatttttctgagttttggaaattgtctttggaggaacttgcaaaagtcaaagcagaacctgatttacagccggttgactatcctgctgacggagtaaaagtgtaccgtctcacatataaaagcttcgaaaacgcccgcattaccggatggtacgcggtgcctgacaaggaaggcccgcatccggcgatcgtgaaatatcatggctacaatgcaagctatgatggtgagattcatgaaatggtaaactgggcactccatggctacgccgcattcggcatgcttgtccgcggccagcagagcagcgaggatacgagtatttcaccgcacggtcacgctttgggctggatgacgaaaggaattcttgataaagatacatactattaccgcggtgtttatttggacgccgtccgcgcgcttgaggttatcagcagcttcgacgaggttgacgaaacaaggatcggtgtgacaggaggaagccaaggcggaggtttaaccattgccgcagcggcgctgtcagacattccaaaagccgcggttgccgattatccttatttaagcaacttcgaacgggccattgatgtggcgcttgaacagccgtatcttgaaatcaattccttcttcagaagaaatggcagtccggaaacagaagtgcaggcgatgaagacacttgcatatttcgatattatgaatctcgctgaccgagtgaaggtgcctgtcctgatgtcaatcggcctgattgacaaggtcacgccgccgtccaccgtgtttgccgcctacaatcatttggaaacagagaaagagctgaaggtgtaccgctacttcggacatgagtatatccctgcttttcaaacggaaaaacttgctttctttaagcagcatcttaaaggctgataaatgtgaaaagccgccgcatatcatcaggcggtttttttctgcaaactgccggaatgagaacagactggagacgaatagatatgaaacaaagaatcattgatgaattaaaacggatcgagcagtcatacggagtcaaaatcgtgtatgccgtcgagtcaggaagccgcgcatggggatttccctcgcaggatagtgattacgacgtccgctttatttatgtgccgaaaaaggagtggtatttttcaattgagcaggagcgtgatgtcattgaggaaccgattcacgatttgctggatatcagcggctgggagctgagaaaaacgcttcggcttttcaaaaagtcaaaccctccgctcctcgaatggctgtcctcagacattgtgtattacgaagcatttacgaccgcagagcagttaagaaaactgcgcacggaggcatttaagcctgaagcaagcgtgtatcactatatcaatatggcgagaaggaacgtcaaggattatctacaaggacaagaggtcaaaattaaaaagtacttctacgttcttcggcctattttggcctgccaatggattgaaaagcacggaaccataccgccaatggactttactgttttgatgaatgaacttgttgctgaacccgagctgaaggctgaaatggaaaccttgcttgaacggaaaagaagaggagaagagcttgacctcgaagcaagaatcaatgttattcaccaattcattgaaacggaaatcgaaagaatcatggaagcggcaaaagaactgaaggcagagaaaaaagatatgacacctgagttgaaccgtttgcttttgaatacggttgaagaagtgtggaaggatggaggaagctgatgttttttgtcgcttccttttctcctttattcgacagaatcccccccgactttctaactatctgattgtgacaaacccacaaaaataatcagaatctttgtattttgagaatattgtgaacgtcggttttgtccatttacaataaactcatacaaatacttcttagattgcggggtgttgaggttggaagtgatcacaagagattttttcttatttttatccaaaagcggctttctcaataaaatggcgaggaactggggaagccgggtagcagcgggtaaaattatcggcgggaatgactttaacagttcaatcccgactattcgacagcttaacagccaaggcttgtcagttactgtcgatcatttaggcgagtttgtgaacagcgccgaggtcgcacgggagcgtacggaagagtgcattcaaaccattgcgaccatcgcggatcaggagctgaactcacacgtttctttaaaaatgacgtctttaggtttggatatagatatggatttggtgtatgaaaatatgacaaaaatccttcagacggccgagaaacataaaatcatggtcaccattgacatggaggacgaagtcagatgccagaaaacgcttgatattttcaaagatttcagaaagaaatacgagcatgtgagcacagtgctgcaagcctatctgtaccggacggaaaaagacattgacgatttggattctttaaacccgttccttcgccttgtaaaaggagcttataaagaatcagaaaaagtagctttcccggagaaaagcgatgtcgatgaaaattacaaaaaaatcatccgaaagcagctcttaaacggtcactatacagcgattgccacacatgacgacaaaatgatcgactttacaaagcagcttgccaaggaacatggcattgccaatgacaagtttgaatttcagatgctgtacggcatgcggtcgcaaacccagctcagcctcgtaaaagaaggttataacatgagagtctacctgccatacggcgaggattggtacggctactttatgagacgccttgcagaacgtccgtcaaacattgcatttgctttcaaaggaatgacaaagaagtaaaaaaggagagattatcatgacaacaccttacaaacacgagccattcacaaatttccaagatcaaaacaacgtggaagcgtttaaaaaagcgcttgcgacagtaagcgaatatttaggaaaagactatccgcttgtcattaacggcgagagagtggaaacggaagcgaaaatcgtttcaatcaacccggctgataaagaagaagtcgtcggccgagtgtcaaaagcttctcaagagcacgctgagcaagcgattcaagcggctgcaaaagcatttgaagagtggagatacacgtctcctgaagagagagcggctgtcctgttccgcgctgctgccaaagtccgcagaagaaaacatgaattctcagctttgcttgtgaaagaagcaggaaagccttggaacgaggcggatgccgatacggctgaagcgattgacttcatggagtattatgcacgacaaatgatcgaactggcaaaaggcaaaccggtcaacagccgtgaaggcgagaaaaaccaatatgtatacacgccgactggagtgacagtcgttatcccgccttggaacttcttgtttgcgatcatggcaggcacaacagtggcgccgatcgttactggaaacacagtggttctgaaacctgcgagtgctacacctgttattgcagcaaaatttgttgaggtgcttgaagagtccggattgccaaaaggcgtagtcaactttgttccgggaagcggagcggaagtaggcgactatcttgttgaccatccgaaaacaagccttatcacatttacgggatcaagagaagttggtacgagaattttcgaacgcgcggcgaaggttcagccgggccagcagcatttaaagcgtgtcatcgctgaaatgggcggtaaagatacggttgttgttgatgaggatgcggacattgaattagcggctcaatcgatctttacttcagcattcggctttgcgggacaaaaatgctctgcaggttcacgtgcagttgttcatgaaaaagtgtatgatcaagtattaaagcgtgtcattgaaattacggaatcaaaagtaacagctaaacctgacagtgcagatgtttatatgggacctgtcattgaccaaggttcttatgataaaattatgagctatattgagatcggaaaacaggaagggcgtttagtaagtggcggtactggtgatgattcgaaaggatacttcatcaaaccgacgatcttcgctgaccttgatccgaaagcaagactcatgcaggaagaaattttcggacctgtcgttgcattttgtaaagtgtcagactttgatgaagctttagaagtggcaaacaatactgaatatggtttgacaggcgcagtaatcacaaacaaccgcaagcacatcgagcgtgcgaaacaggaattccatgtcggaaacctatacttcaaccgcaactgtacaggtgctatcgtcggctaccatccgtttggcggcttcaaaatgtcgggaacggattcaaaagcaggcgggccggattacttggctctgcatatgcaagcaaaaacaatcagtgaaatgttctaagcgggactaaatgggcatcctccctgcgggggtgtccatttcatccatatactataaaaaagaggaggaagtgccatagaaaacacacagctgattatttcgatttgtatttatatggcgggaatgctgctaatcggctactttgcttacaagcgtacgtcgaatctgacggattatatgctgggaggacgctctttgggtccggcagtaaccgctctcagtgccggcgctgccgatatgagcggctggctgctaatggggcttccgggcgccatgttttctactggtctgagcggcgcttggatcgtcatcggactttgccttggagcgtgggcgaactggctttacgtcgcaccgcggctgagaacctatactgaaaaagcggggaattctattacaattcccggattcctggaaaatcgcttcggagatcaaacaaagcttctcagactgttttcgggaattgtcattttagtctttttcacgttttatgtatcgtccggaatggtgtccggcggcgttttattcaacagcatcttggggatggattatcacactggcctgtggattgtgacgggtgttgttgtggcatataccctgtttggcggctttttggcagtcagctggacagattttgttcaggggatcattatgtttgccgcactcattcttgtgccgatcgttacgtttttccacacgggaggagcaggtgatacagttgctgaaatccgctctgtagatcctgatatgtttaatattttcaaaggaacgagcgtccttggcattatttctttgtttgcctgggggctgggatactttggccagccgcatattattgtgcgttttatggcgataacgtccgtaaaagagatcaaaagagcgcgcagaattgggatgggctggatgattttgtctgcagtaggcgcagtgctgaccggtttgggcggaatcgcttattaccatcagcgcggcatgacactgaaggacccagagacgatttttattcaattagggaatatcttgttccatccgattatcacgggttttctgatttcagcgattttggccgcgattatgagtacaatttcttcccagctgcttgtgacatcaagctctctggtagaagatttgtataagtcgatgttcagacgctcagcttcagataaagaactggtgtttttaggccgactggctgttctggctgtttcaattgtcgcgttggttctggcttgggagaaaaataacaccatccttggattggtcagctacgcgtgggcgggcttcggtgcatcattcgggccggttgtactgctcagtctgttttggaaacgaatgaccaaatggggggcactcgccggcatgattgtgggagcagcgactgtaatcatttgggcgaatgccggtctttcggactttctgtatgaaatgatacctggttttgctgcgagtctattatccgtcttttttgtcagcatattgacgcaggctccgtcacaagctgtcacagaccagttcaacgactaccaagatacaatgtcacaataaagatcgaaaggaggaggaaggggctgtccctttttcctcttttctccttttaagcggccatttttttcttttggaaacaaacgtatttttttctatacaaaaagaccccgtatggatatgattaaagtaaaaaaagtataggagaaaaaggtatggaagagcttttagagagagttttttcattttcagatgttgataagctgattgattttattagctatgaactgcaaaagccagtgatactggaaagcgcggatttctttttgttagcctataattcttactatattaaccattttgattctgccaaccagcagactattttttcgaaaaagtgtccggtccagatttttgagaggtttctgaaggacggaattattgaaaaattgaaaacagagcctgagccttttcgcgtcaataaaattgaaagcattgggttaaaccagagggtggtcgtgagtgcaaagcacaaaggggaagtcatgggctacatctggattcaggagctggaccaaaatctgacggatgaagagctcgactttttgtacgagacctccttccatgtcgggaaaatcatttataaaacgaataaattgaaacaggaaaaggaagaaaaagcagaggatctcatcaaacgggcgatctatcagcaatttacctctgagaaggaactcagacgggaagctgaaaggatcaacaccgtgctgccttccatgttttcagttgttatcctgcacgccgcaaatggggatggggaagcggttgaggatttaaaggaaaatatcaggtcgtacctgaatttacgggataaggtcagtcatgtcttaacgatcgaatcaaacattgtcatcgtcgtagcgagtttttcccaaaaaagctccgtctcctcagcagcttctgagtttattaacaagctgttaacacattttcactttcaaaaaatacctacccctatttatatcggtatcggaaacgaatataatcacctattaaaacttggcaagagctacacagaagcacttgaagtcatcaaagccgcagaaatcaccggcaatcaggaaaacattccatatgaatatgccaaactcggcatttaccgctatttagaaagcatcgaacagaaaaatgaatttttagaatacgagaataaagatttagctttattaaaagcaaaagacgaagaaagcagcactgagctgctcaaaaccttggaaatctatctcctcaacaactgcaaaacaaaaccagcggcagaacagctgtttattcaccaaaatacattgaattaccgcatcaaacagattactgagatgacgtcgatcgatttaagcgatttcagaacgcggtgccagctctatctcgatttgatgctgatgaaaaagaaataaaaaagaaaccagtacttgtactggtttcgtcttcacttaaaatcctctgtaaacatacggatcatcaggttttttaatggtattccagtcagttactttgacgacagggagagttgacttgaatggctggtaatactctgaggccagagtgcccttaatgtgaatccattcatcatccttgatgtccatgtccttcggaaattccacaagcatcccgtacacgccggaatcagcgatacagtgaatgatgccaaaccttaatacgaacagctgatttttgttaattgcgtttcctttgtaagcaaatccatggaattctatcgtccgtccgagaaattcacccggatagttatagatggtttccattccttttaggaaatcgtcatcggtcagagaaatctcttttttgctggaatacttattaaacagctgtttcatttgtttgtcatagctgtcttgcgcgtaataaaggctggcatcaggccgcaaatactgtgtttgggagtaatgatctccgctctccatcgccttaaacgagaacccttttgttttgacaatggatgagtcaagcgttgcaatcgggaagaagatgcctgacaccaaaggaaaaagaaaaacaacataaatcaaataacgctgataaaatggcttgttttgttcatggtcatgctcgtgatcatggccgcacccgcaatcatggtgacccccgcttttttcaggcgacttgataaatagatatgcttggacggcggtcagaatagccagcaggaaaatcgcaataaaggatagataggaatatttcatattgatatattttgttagatttcctgaggcatgcagatgataaaagaaaaacgtaaatcccatcagcaccaataaacgaaacatccaatcacccctttaccagtagtgatcccgctaaaacaatcacgacaatatatgtaatcagcaggaaaacaaatcgttttttgaaggctgcaagcatcatcaatagattcttaatatccaccattgcgccaaagacgagaaaggcgattaacgatcctaatgaaaatgtgctgctgaaggaagacgcgatgaacgcatcaacttctgaacaaagcgacaggacaaacgccagacccatcatcacgagggaagaggatacatcattctgcccgatcgcaagcagagtggatgttttgacatacgtctgcatagcggctgcgataaaggcgccgatgattaaatatttccccacggagaaaaattcatcaatggcatgccgcaaggtcccgcccagtttttggagcaaggtgccgtgatgatggtggtggtgcccgggttcatcaggctttaaaagctggttatctttaaattgataggataaaatgaccccgatgatcagcgaaacggcgagagccagtccgcctctgtaaaagaccacgctccatctattcccgaacgcaatataagtagaaaataaaacgataggattaatgataggcgcggtcagcatgaaagcaacgcccgcatgcagaggaactccctttaacagaagccgcctcgtaatcgggatgatgccgcattcgcaggcgggaaataaaacgccggccagcgcaccgaataaaacggcgagaaaacggtttttcggcatgattcttgcaatcatttcttcagaaacaaacatttgaatgattccggaaagtatgacgccaatcagaataaacggaatggcttctattaaaatgctgataaaaatagaattcagctgaagaaaagatgattgtgctgtcacaataaaacctccgctcatgttaagctgcctttcttatgataccagaaaaaaaggcactgcttgtttgacggaggaagggaaaggatcgtttcactttggttaggattccaaaaaaccgagtaggatactgtctgtttctgcagcttcttttccgagccaaatcaggtgtccccatgagtgaagcaaacagagaacagcgccacgaatgtgctcttttgcatgatgtgcatgtgacaagtcaaccaatccatcataaacactttgcataatcagcacgggacatatgatggcttgcaggtcttttaaagagacagcggcggtttgtgacaagtcaatcagaaatccttcacccgagcgctgccggctgttcattttccgaaatgcttctatgtctttttcattcatcaaggacttgattcgctgaaacggaagcgtgctgaattgggggctcatagctcgaaacatcaaacgcgggaaagcgttattcaaggaagaaatcagcttccatatccacttttctaccggcgggcggaagagaattttccccaatttatattcagtgtcttttggggtgagccactctttggtgactgcggattgcagggtcaatgtatttactcttttcggataatgtgaggcaaagcatatgccgctcggccctcctgctgagatggcgatcacatggacactctcgatttgtagatgatctaataatttcacatagaaacggcaggcattggcaagactttttccaatttcttttgacgtccgtccatagccaggccttgaaggcgtaatgatggaatacccttgctcaatcaacgctgtgtatccgtattcctcgtaacaatttgaatgcccgccatgcatgacaaggatcggagttcccttgcctgtcacagaatattctagtgtactgccatcgaaggtgatcgtttcgactcgtcttttcatctgttactcccatttgttttttgcctattatagggttttcagcaattgaccacaaggtgaagaaatgaataaacacaagctcgtgaaatatgatatactttgtattgatattcattctcaattaaaatgatttgatatagatgtgaacgggaggcaggacggatggctgagaatcaagaggtatatgacgttacgataataggcggggggccgatcgggctgtttactgctttttactgcgggatgcgggagctgaaaacaaaggtaatcgaatttttgccgaagctcggagggaaggtgtctttattctttcctgagaaaatcattcgcgatatcggcggcataccggggattgcgggaaagcagctgatcgagcagctgaaggagcaggcggcaacgtttgatcctgatatcgtattgaatcagcgtgtgaccgggtttgaacgcctagatgacggcaccattgttctgacgggttctgaaggggagaagcactatacaagaactgtgattttggcttgcggcatgggtacacttgaggtcaatgagtttgacagcgaggatgcggccagatatgcgggcaaaaatcttcattatggagtggagaagctcgatgcgtttaaagataagcgcgtggtgatatcaggcggcggagatactgcggtcgattgggctaatgagcttgaaccgattgcggcgtctgtgactgtcgttcatcggcgtgaggaattcggcggaatggaaagcagcgtgacgaaaatgaagcaatcatcggtgcgggtgcttacgccttatcggctggagcagttgaacggagatgaagagggcatcaaaagcgtgaccgtttgtcatactgagtctggccagaggaaagacatagaaattgatgagctgatcattaatcatgggttcaaaattgatctcgggccgatgatggagtgggggctggagattgaagaaggaagggtgaaagctgacagacatatgcgaacgaatcttccgggcgtgtttgtggcgggcgacgcggctttttatgaaagcaagctgagattgattgccggcggatttacggaaggcccgacagcggtcaacagtgccaaggcttatctggaccctaaggccgagaatatggcgatgtattccacccatcataaaaaattggtgcataaataaaacagcccttgggggaaagggctgccagccatcagctgtgaaggagctttttctgcgtctgttgattctgaatgaaagctagcaattcatcctgttcttgtacagctgtgaatccataagcttcggcagctgagtcatcgcctatacagacgatagggggccggcttgctgacaattccggcgaaatgccaatttgttcgccaccattgatcaattgctgaacggacagcttgttcgggcaaatgaccatgtgcagcggggattcactgatggtacgctgaatcatgtgggtgaaccggtcatctatgacgttttcatgagtgatataaaacgaacaggattcatgcttttgcatgttttccactgcatggcggctcccgacaacaagacgtttctctgaatcaggctgaatggcggtgacaagaaagccccgtttctcaagctctgtctttgcttgctcagatgctgcactcagtttggctgtcagctggcggatgtcgattttctgagaagccagtgctctgaaaaattcacaaaccgcccggcgcgatgtgaaaaaaacgtcttcaaaggtgccaatctttcgaagaatttcttcattgacaggcatgttttcggtccgccatttcggccactcgatgagatcggcgccggaatcgcgcagcttgtctgcaagcgggtcttcatcttcgccatgagtcacaaccatcaaatgccgtccgatgagcggtttgctttcaaaccagctgtgtgtttgaaagttgacgatgtctccgatgacgataatcgcagggtttgtaatctggtgttcctgcactttttgctgaatgttctcaagtgttcctttcacactccgctggcggccccacgttccccattggatgacaatgacagggacagaaggcgatttcccgtatgaaataagctgctggcaaatataagacaagttcttgacacccatgtaaaaaacaagggtttgaacgcttcgggccagcccttcccagtcaaggttcggcgtgccttttaatgatttatcatgcgctgtaatcatggcaaaagacgatgcaaaatcccgatgcgtgacggggatgcccgcatatagcggcgctgcaattccagaggtgattcccggcaccatttcatagcgaatgccgtgctcatgaagagcatctgcttcctcgccgactctgccgaatacgctcggatctccgcccttcaagcgaacgacggttaacccatttaatgctttttcaaccagcagggcgttaatttctttttgtttcataaaatggcggtttggcagttttccgcaataaataaactggcagtccggtgatgcaaattcgagcagcttcgggttggcgagccggtcatataaaatcacatctgcttccttgagcgcctgttttcctttgatggtgagcaggcctgggtcgccgggtccggctcccacgaaatatacgattccgttcttcatgatcatgtcatccttccgtcactgtaaaaaatgaaggaccactagaaaagtgatccggtcttttgatcaatatacgagataaacatgttctccttcgatcagcgtttcatatgttttgacgcatccgtggtcaggttcttggacgattccgtcttctaaggaaattttccagtcgtgcatcgggcagaaaacatattgaccgctgacgatgccttctgccaggacgccgcccttatgcggacagcggttttcaatggcgcggatgcttccgtctgaaagcttgaaaaccgcgagctccttatcttcaatatacactgttttgcctaattgttcaggcaattcttcaatttttccgatacatacttttgttacgtctttgtttaccatgtccattcctcctcaatgatagtttttgtcattatgatgtggtcacgacattttcaaataattctttagaggtttgtttatcctctaaaaagtctttccacggatccttgtggacagagagtgtttcattcattcggccgttcagctcctgccgcttttccggatcgtttaacacggattggacatgggataaaccgacgcgctcaagccatgcggacgtacgctccagatagtttgcggtttccctgtaatattgcaggtaagcgcctgcgtattctaagacttcttcatttgttttcaccttcatcagcaaatcgccggcacgcaagtgggttccgccgtttccgccgacataaagctcccagcctccgtcgatgccgacaacgccaaggtccttaatgccggattccgcacagtttcgcgggcatgcagacacggccattttgactttgtgcggcgtgtttagcccttcgaattttttctcaagcgcaatgcccagtgccatggagtcttgtgtgccgaagcggcagaattgctcgcctacacatgttttcactgtgcggagcgtttttccgtatgcgtagcccgacggcatatcaagatcttcccataccttcggaaggtcttcttttttcacgccgataagatcaattcgctggccgcctgtcattttcacgagtgggatctcatatttgtcaacgacatcggcgatcttgcgcaaatctgtggagttggtcacgccgccgtacatccgaggaacgactgagtatgttccgtctttttgaatattggcgtgcattcgttcattaacaaagcgggatgtccggtcatcctcgtatttggttggattgatcatgcctaagtagtagttcagagccggccggcatttggaacagccttctggcgttttccagccgagcacattcatgacttctcttgtatgtgacagccctttggctttgatttcttctacgacttcatctcttgacaatgtggtgcagccgcaaatggcttctttttgcgctgacgcatcaaagtctgatccgagcgtatgctggaggatttcttctacgagtggcttacagcctccgcatgagcgggatgcgccagtgcatgctttgatctcgtccgttgacgagcagcccttttcctgtatggcttgaataatcgcaccttttgacacgccgttacagccgcagatgatttcatcgtcgctcatcgctgcggtgatgcttgtgcctgcttcttggttgagaggctgtaagattgatattttagaggtttcagagatatcggcttctttttgaatcatagaaaacaggcgattgccttcgctgctgtcaccgaataaaacagcaccgacaattttgttgtctctcaggacaatttttttatagatgccgtcctgctcatcgaagactttaatcgcttttttgtcctctgattcatcaaagtccccggcagagaaaacctcgacgcccgatacctttaactgtgtggagagaacggagccctcatacgggtttgtttcgatgccgcaaatatgcttcgccagcacttttgcctgttcatagagcggcgccacaagcccgtaggcgattcctcggtgctcggcacattcgccgaccgcgtaaatgtgcgggatttcagtctgcatataatcattgacgatgatgccgcggttaaccggaatgccgctctcggccccgagcgttgtatttgggcggatgccgacagccatgacgactaaatcagcttcaatgcttgtgccatccttgaatcggaggccttcgacacggtcgtcaccgacaatttcttctgtttgcttttcaagtaaaaaggtcataccttgtttttctaactcgttttgcagcaggcgtcctgccgttgcatcaagctggcgctccatcaggaatggggcaaggtggatgacggacacatccatgccaagattcagcagtccgcgagctgcttccaaaccaagaagtcctccgccgatgacggcagcttttttatattgttttgacgcggcgagcattgtgtctgtatcttttatgtcccggaaagctgtgacgccttttttgtctgcgcccggaatcggaaggataaaagggaccgagcctgtcgccaggatcaattcatcgtaaggctggattctgtctgcatctgtgatgactgttttgttttccgtgtccactttgatgactgtttcatttgtatacaattgaatgttgttttcttcgtaccagtcccaatcgtttaacgtaatatctttaatatctgtatcgccttgaagcacttttgacaaaaggattcggttgtaattgggatgcggttcggcaccgaaaattgtgatctgaaactcgtctttagcaatactcagtatctcttcaatggcccttaccccggccattccattaccaacaagaactagctgtttttttcccatcagatgatccgctccttatcaatgttttttccagcgtagcacagcaaaaaggaatatttaagatacatgttataaaatgtaacaaaatatacgaaaagttctaaaaattttatgaaaaatttaaataggtctgattcggacggcgcataccttaaaaccgggcattttacaggctggatctaaggcttccccgattaaatcattcacattttgagcgtctgcccaatggatgggaacaaaaacagtatcttttctgatttgttctgataatttgctgcggacggtgatgcttccccgcggcgattctatttttaccagtacacggtcctcgatattgtaggtcgctgctgtttgcggatggatttccataaacgattcaaaatgtctcgcggcaagggcggcgctttttcttgtttggacgcctgttaagtagtgagacatgactctgcctgtcgttaaataaagcggataatcggctgtcggcttctcttttggaacaggtggttcgtttggaatcacacttaatgccgctttttgatccggatgagcaaatgattctgtaaacaagcgcccagttccgggatgatcagattccggacacggccaatgaatgccgccttcacgtctgagcctgccgtatgagatgcctgaataatcggcaatcccgcctcggctcgcttctctcaattcattaaaaatatcctccgctgacgtataagaaaagtagcggcccttgccgagagcggatgcgagatcacaaatgatctgccaatcatgctttgcttcgccggggcatggccggcttgcttctcttaatgtcacgcgtccttctacatttgtcatggtgccttcatcttctaagtaagaggaggcaggtaaaatcacatctgcgtatttcgcagtctcagaaataaacaaatcgattgcaacaaagaatgtcagtttccttaaagcctttttcacgagattcgcatttgggctggagacagcaggattggagcacatgaggaacaatcctttgatgtcgccgtcgttgattttttccatcatttcataggctgagacaccttttcgcggcagatcatcctgatggattccccacactttcgcaacatgtgcccggtgttgttcgttttcaatagatcgatagcccggaagctgatcggctttttggccatgctctcttgcaccttgcccgttgccttgtccggtgatcgccccgtaacctgagtaaggcttgccgatttttcctgtgatcagcaccatgtttaagaagcctttcacagccgctgttccatcggtttgctgttcaatcccgcgggctgtaaacagcatgccggacgtttccttggcaaactttacagccgcttttcttatatccaccagggggacactcgtctgttcggcgatgtcattcaggtccaacgagtcagtatgctgcttcagctcttcgaatccatttgttcgtgattgaatgaaatcctcgtttataagctgttcgtcgatgatgattttgacgagaccgttggcaagggcggcgtctgtgccgggtttgattttcaaatgaagatcggcgatttttgttgtcgctgtttcacgcggatcaatggcaatgatgtaagctccgttttctttcgctttttcaaaatatggcataatcgtaggctggcactccgcgatattggtgccggccagaatgatcacacgggtgtggggaatgtctgataagggattcgttaagcctctgtccgcgccgaatgtttggttggctgcggttgctgcggcggacatacaaagcctcccgttgtagtcgatgtattttgtctgtaagcccacccgtgcgaatttccctaacaaatacgcctcttcatttgtaatcgaggcgcttccgtataccgccatagcgtcatggccgtgttctgcttgtatcattgtcacttggtctttaatgtaattcagtgcttcttcccaggaaacaggcataaactcgccgtttttcttcagcagcggccgggtgatgcgggaggagttcagggcatgctggtgggcgttcatgcccttcatgcatagccgaccctgtgttgtaggattatcaatcccgatcgcagtgtactttttgcgcgtgacgatggtttgttccacgagctgcattttgcactgcatgctgcaaaacgggcattgagtgtcatatgttttttctgattggacgtcttgctgtttatcacggaaatatctaagcagtcgttcagtcaaaatgcctcatcctttcttatatgcacccgtctctacagtcgggttttgaatcagtgacagatctgtttggaggctttccagcagctgtgcccttaggtcttcttcgaatagcacttctctgatatgaacgatcccgagacggtctatccactgatgaacaccttctaagtaatgagccgtttcccgataatactggatcagtcctttgatcatgccggcagtgctgtcttcgttctcagtcacgcaaaacaaagctcctgaacgggcatgagttccccggacgccgccgatgtgaatgtcccagccagcttgtctccgaattgcgccgacatcttgcagggcggcatcggtgcagtctgtttcacatgataagctgatagaaatgggagcgggtaagggaagcgtctcaagttgtctttcgatttgggctgccagctgctgaatcgatcgattttgcccgcatgtacatgctttgatgctttgcagcgtgtgtcggtgttcattggtgtaaacgggcattttcagatcttttttcatgttcgggagatccgcaggcttgatcccggaaagcttcagcctttggccgtgagtgatggatacgtcgggaatgctgtatgcctcaatgatgttggcgatggttcttagctgctccgcgtttgtccgcccgccgtacatttgcgggatcaggatgcatgtctcttcagtggctggctcaggctggacaaacccagggtacagcatttccagatagtattgaatcgcaggaacacaagtactgcatccgttttttgttttccagccaagctggttcatcacttctgccggattagtgaatggcctgcgctgaagctcagcgatgatgtcgtcttctgtaaaatcagtacagctgcaaaacgaaggtgtgccggcgggcttcgtatattcgctgttggtcatgtatctcaaaaggtcttcaacgagcggtttgcatcctccgcaggacccagtggctttggtgcagtgcttgacttcctcaacagttgttaagcttttcgtgtacaccgcgtcttcaatcgcgcctttcgtcactgtgttgcattggcaaatcgtttcactggaaggcatggattcaaataaagggccgcttgtctccggttcgatgatctgctttttgacaatggagatgtctcgttgtttaagcaggctgtcgagaagccgctgcttgtcatgggtgtctccgaataaaataacgccggccagtttgtcatctacaaaaagtgcttttttataaacgcctgcttgttcgtcgtagattttgatgctcgtcgtgcgttcatcctcttggatctttcctgctgaccacacatcgattccagctatttttaacgccgaagatggtgctgagccttgatattcctcacatggaacgccgcaaatatgactggcgagaacttttccctgctcataaagcggagccaccaatccgtacaccgttccgttatgctcagcgcattcaccaacggcgtagatattcggttcgcttgtctgcatgaagtcattcacgatgatcccgcggttcactttgattccagcagatacagccaattcaatattcggtttgacgccggccgccatcacaatcaagtctgcttttaatgaagagccatctttaaaatggattcggtctgccttcgtggcgccggaaatggagacggtgtctttctccaaaagaaaggttaggcctttttgttccagctctgtttgcagcagccgcgccgctgtttgatcgagctgtttttgcataatgccggcggagtggtgaatgacgctgacattcataccgagatgctgtaaaccgactgcagcttccagtcctaataagccggctccgattaccgcagccttttgaaagtgctgggccatcttcatcagtgcttggcagtcttctattgtccgaaatccatagacaccttttttgtctgccccggggatagggagaatatgaggggaggagcctgttgccactattaatttgtcatacgacagagtgcgtttccgatctgtgatgacctgctgctgatctgtatcaatttgaataaccttttcgcctgtgtaaagcgtgatcccgttcttgtcgtaccaatccttgctgttcagtgtaatgtcatcgagtgacgcttcaccctgcaatacagaggataagagaatgcgattgtaattgggatgcggctcgcttccgaaaatgacaatctcaaacatgtggcgattcagctttaatacttcttcaatacagcggattccggccatgccgtttcccgctaacaccaatctttgtttcttcatgtattagacctcctttggcgaagctcgtaagttttctcctattaaaaattatgtcacaatgcactgttaacgcattaaacgtgtcacaaaaacttacacatgtcttttccagaaaataatggtcctatatccttgattcagaaaatgtaaaataatgagggtctagaaaggggaatcttatgaagctgtcggaactgaaaactagcggtcatccactcactttgctctgttcctttttatactttgatgtcagttttatgatatgggttatgcttggggcgctgggtgtttatatttctcaggattttggcctgtctccttttgagaaagggcttgtcgtagctgtgccgattttatctggatcagtgtttcgtatcattcttggtattttaacggatagaatcggaccgaaaaaaacggcagtgatcgggatgctggtgacgatgattccgctgctttgggggacattcggcggccgttccctgactgagctgtatgccatcgggattctgcttggcgtggcgggggcaagttttgctgtagcgctgcctatggccagccgctggtatccgcctcatttgcagggacttgcgatggggattgccggagcggggaacagcggcacgttgtttgcaaccctgtttggccctcgtctggcagagcagttcggctggcacattgtcatgggaattgcgctaattccattattgatcgtctttattctttttgtatccatggcaaaggattctcctgcacagccggctccgcagccgctcaaaagctatctgcatgtgttcgggcaaaaggaaacatggtttttctgcctgctgtacagcgtcacatttggcggatttgtcgggctctcaagctttttatctattttctttgttgatcaataccagctatcaaaaattcacgcaggggacttcgttacattatgtgtggcggcggggagctttttccggcctgtcgggggcttgatttcggatcgtgtcggcggtacgaaagttctttctgtattgtttgtcatcgtggcactgtgtatggccggagtcagcagcctgccatctctctcaatggtcattgttctattgtttgtcggaatgatggggctcggaatgggtaacggtgcagtattccagctcgtgccgcagcgttttcgcaaagaaattggcatggtgacgggaatcgtcggtgcggccggaggaatcggagggtttttcctgccgaacatcttaggatctctcaaacagatgacaggcacatatgctatcggttttatcacgttttcctgtatcgcgctgctggcgtttgcacttgtgcttgccgcaggctattactggcggaaaagctggagcgcggaaagcagcccggcggatgtttaggattttgacggacacgcgtttgtgcgtgtcttttttattttctcttgattttcaacagtgaaccgatcaaaataaatagtaattattacgatttgttagtgagaggagttttctgaatgaatcaacatacgctgctcccgaaaaaaacggagcgtcttcaatactttggatcggtcagtccggtcaaaggcgagaaaccagtggaaaaagagaaaatgaaggacctgcaaaatatcaggaaggattatttttttgacattcagcatgtaggtgtcgctaatgtgtcccatccagtcacaatcacttctgccatgatgcctgccgagcaaacaacggctgcgaactttacaatgacttgtaatttgccgagaaatcagaaggggattaacatgagccggttaacagagctgctgcaagtctatcatcaaaatggctggattctctcattttcctctcttcagcaatttacgaaagagcttgcagaaaacatggacacatcatctgccacagttgaagtgaggtttccgtggtttttcgaacggaaaagcccgaagcttgagaaagcgggtttgatgcatgctgatatattcatgtctgtcacctatcacaaagatcagccgtttaaacagcgtgccggcatctcagcaaaagtaacgactctgtgcccttgctccaaggaaatcagcgaatacagtgcccataatcagaggggaacggtcagcatttgggcggatattcacccggccgcatcgctgccaagcgatgttaaagctgatttgcttcacgccgcagaatcaaatgcttctgcgagactgcatccggtattgaagcggcctgatgaaaaagccgtgacagaaacggcctatgaaaacccgagatttgttgaggatctcgtccggctgattgctgctgatttgtttgagcttgaatgggtgtcggcctttgagattgaatgccgcaatgaagaatcgatccatctccacgatgcctgcgcgaagctgcgtttttcgaaggaagtggataaaatatgaaactctcattattcattattgcagttcttatgccagtcagcctgctgtcagcctgctccgatcatgcagaagaacacgcaagtatcaatacaaagaaaacggtcgaaaacataacggacgttcgaaaaacagcaaaaacaagcattgattggacaaagccttcgggcggagaatacccggatattaaacagaagcatgtctggattgatgtgaatgtgaaggagcagaaggcttacatcaaggaaggaagcaacaccatctatacaatgatgatctcttctggtcttgatcaaacaaaagatgatgctacgccaaagggcaccttttatgtagagcctgaacggggagaatggtttttctccgaaggataccaggaaggcgcagaatactgggtatcatggaaaaatcacggtgaatttttatttcatagtgtgccaatgactaaggatcaaaaagtcatcaaaacggaagcagaaaaactaggaacgaaagcatctcacggatgtatcaggctgaccattccagatgcgaaatgggtatatgaaaatatccctgaacatacaaaagtggtgatcagctgaattgaaaaccgttgacaaaaaggaaaaaagaccatacaatttaaatcgtaacaattgcgttttatgataaatggcttatcattggctgtatctgtgaaaagcggaaaggctaaggatcttgctgtcattgatccccatgaagcgtctcttgaaaactggaaacgaaacccaagctactttctgatgagatatttgcgctttccatcggttcagcaacgcaagtggagcgattgctttatgcaagctgcggttttccgaatgtcggcaaggatttgcgatggggaaaaggattaaacgcggttgaagcctttactgatttagaaaccgggtggcagcgagaaatgagcgcgaaaagctgctctacactattgtacatatggcgaagtatacaatttaaatcgtaatcattctattttaatggaggcattattatgaaaaaaattccggttaccgtactgagcggttatctaggtgcgggaaaaacaacattgctgaacagcattctgcaaaatcgcgaaggcttgaaaatagcggttatcgtaaacgatatgagcgaggtgaacattgacgcgggcttggttaagcaggaagggggcctttccagaacagatgaaaagcttgtggaaatgtcaaacggctgcatttgctgcacgcttcgcgaagacttattaattgaagttgagaagctggcaaaagacggacggtttgattatatcgtcatcgaatcgacaggaatcagcgaaccgatcccggtggcccagactttctcttatatcgatgaagagatgggaatcgatcttacaaaattctgtcagctggatacgatggtgacagtggttgatgccaaccgtttttggcatgattatcagtcaggcgaaagccttctggaccgcaaagaggcattgggggaagaggatgaaagagaaatcgccgacctcttgatcgatcaaattgagttttgcgatgtactgatcttaaataaatgtgatttggtcagcgagcaagagctcgaacagcttgaaaacgttcttcgtaaactgcagccaagagccaggttcattcgttccgtcaaaggaaatgtaaaaccgcaggagattttgcatacagggttatttaacttcgaggaagcgagcggatcggccggctggattcaagagctgacggcaggccatgcggaacacaccccggaaacagaagaatacggtatctcttcatttgtatataagagacgtttgccgtttcattctacacgattttaccgttggttggatcaaatgccaaagaacgtggtacgtgccaaaggaatcgtctggtgcgcatctcataacaaccttgctttgctgatgtcgcaagcaggtccgtcggttacgattaagcctgtatcttattgggtggcggcgctgccgaagcttgagcaggagcaagtcaaacagcaggagccggaaatcctggaggagtgggacccggagttcggcgaccgcctaacgcagctagtttttatcggaactgacctggatgaagaaacgatcacgaaagagcttgatcaatgcctgctgactgaatatgaatttgattccgactggtcgctgtttgaggacccgtttaaatggaagctgaatcaatagaaaaaaagccgtcccctggggagcggctttttttaatgaaacgtttgtttaaacataatgagcgtattttttctcaaggatattctgaaagaccgcggcaatggagcagatggcccaataaatgagagcggtcagaatatacatggtcatataatcaaactctctgcccccgatgattttcgcatgctggagcaattccggcactgtaatcatcgcagcgagagatgatgccttgattaagtcgagcaatacattggcaagcggaggcagcgcaatacgtatcgattgcggcaaaatgatgcccctcatcgtctgccaataggaaagacccagcgaggatgcggcttcccactgtcctttttcgacggatgaaatggctgaacggttaatttccgcaatgtaggcggcgctgtttaggctaaagccgattaaagcagccgtgacagcggaaaattcaatgccgatataaggaaacccgaaataaaggataaacaaaatcaccaaaatcggaacgccccgcataaatgagatatagagcttcgccggccatcttaacaaagcaagcttagacattctggcgagtgatatgaacaggccgatcacagttcccgcaaacatgcttacaaaagagataagcagtgtatacccaatgccttttatgacataagggaacgattcaatagccagcttcgtgttgaaaatatattcccattgaatgctattgatcatggcgtccgattacaaatcaacgtcctgaacgtcggcatcaattttttttgatacatctgctttattgaagaattgtttcgacagtttagtcaaagagccatccttgctcatctctttcaatgcttcgttcatctttttctgaagtgccgcattgctttttttcatgacaagggcctgtttgttcggcatgtacttgatgtcaggatgaattgttatgttgagatccgggaatgccgcgagcgcaagtgtctgcaggtaatagtcgtttaaaatgacgtcagtgcgtccgttggcaacatcttttaaatattgctcattcgtcgcattatcataaatcacttctttggcgccgtattttctcgcgacctccatgtagacggttgtagccgcgccagccgctttcttcccttttaaatccttgagcgttttaatccctgataaattgtcttttcggacaattgccgtgccgtatgaatatttataaggagtagaaaatgcgaacttcttctcgcggtccttcgtcacatcgatgtcattcgcggctgcgtcaacctgtccgctgtttaccgctgtcagcatcccgtcaatgcccatctccttgaactcaaccttcaatcccaggcgttttgccgcttcacgaacgacttcaacctcgtagcccgtcagcttatcagagccagagtcagtatcgtgataagaagtgggataaagcgtgcctgatgtagcgactacgattttccctttatccttaatctgctcccagcctgtatccttggaatcggcttcatttttgccggaacaggctgccaatataagaaagaaagccattgtgaaactgaatataacggctttggaatgcatgaatgatttcacctatagttcccccaatctgttaatcaactaaaaagatagcattgaacataaggggttgcaatatgttgatcgcgttttcaaaaagttcgaattgtgtatacaaaaggcatgggtgggtgattaaaagcggctatgaagggaattggtgatgaacaaaggagttgtccaaggatgaatgcccgacgtaccaaggaaacacatgtggacgtgaaggatgcagtagatccgttattcctctatgccaataccgtaagaaatggtcagaagcatgaaatcgatcttcagaataaatttaagtcttgctgatgcccctaagacatatgatatatccgatgagaaagaaaatggaaacatttaaaccataatggggagtcaaatgaatatttacaaaccagccggattttggatcagacttggagctgcattgttagactatattatagtctccgtgccgcttttgctgatctattggctgattacaggaaaagacccaaacgacagcatgttcatcagtttggttgttctgctgtattctattttgctgccggtgttttggcgcggttatcttatcggaaaaaggatctgcggaatcagaatcgtaaaaaaagacggatcacaggtcagtctgttaacaatgtttttacgggttattgtagccggcctggtttacgttataaccttcggactcggcttgatcgccagcctgattctgattgccgtacgagaagacaaacggaccctgcatgatttaatcgcgggaacatcacttatgcgaccaggtgaagaagaacttaatgctgacgaagagattagaaagagcgaataatggttcgctctttttatttttatgcataaaaaatacaaggcagcaaaacatatgaaaaataggattggaggaataaactggatgaaacgaataaccatcaacattatcacaatgttcattgcagcggctgtcatttctctgaccggtacagctgaggccgctgaaaaacagcagcagtctcccgcaaatgttacactgacagatcagcaaaagaaagagattgaacaactggaagcagagattcttaaaaagcgcaaagacgtgatctcaaagtatgtacaatacggtatcctgcctaaagaaagaggagaacacatcaaaaatcacttggacaaacactttgaaatgatgaaacaaaacggctttgttccaaagcaccatcctcatccgcataaatttgaaaaaagacattaaaatggaaagcatccaatgggaattgggtgcttttttattgttaaaagttactgaatgaattttccggaaaaatatatcgcttttgttgattatatcttataataagatataaatggggtgtataatgatggaaatggatttaatctctaaacttaatcagcagtggacagatatttattatttattacattatcaacataaagataatatttctcaccaggcaatacggattatgcagcatattgaaaagcaaggtgaggcaacaataggagctttggctgaatacttgtctgtctctcacaatacggcgtcagagcatactaaacgtttgattcaaaggggatttatagctaaacggcgaagtcaacaggatgaacgaaaagttttagttttcttaacacaagaaggaagatctgttcttgaacagcatacacagctagataaagagaaattaaaagaaataattgaacgaatgagcacattagaaaaagaattacttgaacaggcatttgaacttttaagtagggaagctaaacaatggcagttttaagtaaagtgatcatctctgcgttgattatcggttttgttactgaaatatcaaaaagacatccgacctatggcggcatcattgctgctttgcccttggtcagtttattaagccttttttggatgcaaatacaaggtgaaaaaatagctcaattaagtcaatttgcatctggtgtgcttacaggaatcccagctacagtttgtttactagctattttggcttttttgctgaaaattcatgtgccgttttggtttgcattatgtgttggaatactaggatgggctatgtttttatggatgcagaagatctttctcaatatattatttaactgagtatagaaaggagatgctatgtttttaaaaaaggttactcttcttcgagataagattttggactttgacagatttccttttactatcccggctataagtcaattaaatgacatcttatttactagccaagtgactttttttgtgggggaaaatggatctggaaaatctactttgcttgaagcgatagcagataagtgtgaattcaatacagcgggcggaagccgaaataatgtctatgaattacgggagtcagattcccatttaggagattacatacgtttatcttggcttccaaaggtaacaaatggcttcttcttaagggctgaatcgttttatcatctttctcttcatctggatgagatggaactagatgctcctcagccataccgttcctatggagggagaccgctacacaatcaatcacatggagagtcctttatgtctctattccgtcatcgttttaaagagaaagcgatttaccttttagatgagccagaagcagcactttctccagctagacaattagcttttttgagagttatacatgatttggtgaagggcggaaatgtacagattatcattgcgactcactccccaatcctactgggctatcccaatgctaatattttaagctttgatggtggaagaatacatcatattgaatatgagaatacagagcatgttcaattaacacgatattttcttggacaaagagaaaaaatattagctgagctgttccgcgactaacatcgagttgatctgaaacgcgtttcatagcctatgataggtttatcaaataattcaggagtgataaacactatgatccaccagcatccagaatcttttccgaaacattttttgtggggctctgcttctgcagcgtaccagattgaaggcgcttggaatgaagatggcaaaggcccttctgtttgggatgtgtttacgaaaataccgggcaaaacgtttaaaggaaccaatggcgagattgcggttgaccattatcaccgatttaaagaagatgtcgctctgatggctgagatggggttaaaagcatatcgattttccgtcagctggccacgggtttttccaaaaggaaaaggagagatcaatgaagcaggtctagcgttttacgatagtctgattgatgaattgctttctcatcacatcgagccggttctgactttatatcactgggatttgcctcaagcgcttatggacgaatacggcgggtttgaatccagaaacatcatagaggattttaatcactactgtattactctttataaacgttttgaagacagggtgaaatattgggttacgttaaacgaacagaactacaattttaatcacggatttattacagccatgcatccgcctggagtgaaagacagaaaacgattttacgaagcaaaccatattgcgtttctggctaatgcaaaagccatcgaatcatttagagaatatgtgcctgaaggcaaaataggtcctagctttgcttattctccggcttaccctttatcaagccatccagaggatatactggcatttgaaaacgccgaagaatttatgaacaattggtggcttgacatgtattgctggggaacctacccgcaaattccattccgctacttggaaaaacagggatgggcgccgacaatcgaagcaggagatatggagctgcttgccaaagggaagcctgattttgtaggtgtcaattattatcagacgatcacctatgaacgaaatccgcttgatggtgtgtctgaagggaaaatgaatacgacaggccaaaaaggaaccaatcaggagacggggatacccggggtgttcaaaacgaaaaaaaatccgcatctgacaacgagcaactgggattggacaattgacccaattgggctgcgtatcggtcttcgccgaattacaagccgctatcagcttccagtgtttataacagagaacggtttgggtgaatttgataaagttgaggacggcactgtacaggatgattatcgaattgattatttgcgttcgcatcttgagcaatgcagacaagccatcagtgacggtgtcgatttaatcggctattgcagctggtcgtttactgatctgttaagctggctgaacggctaccaaaaaagatacggatttgtatatgtcaatcgtgatgaagaaagcacatacgatttaaaacgcttgaagaaaaaaagcttttattggtatcaagatgtcatcaagacgaacggagaaagtttataaagagtccctgagagttattctctcaggggtttttcattacacagaaacagcatcaataatataagtgtcggcgtgcaaatctgacatttcagccggcacagtccagcatgtcaattgatagtctcctttaggcagatcaaaggacagtcttttagacatgatgctttcaatatgaattccgttttctgtgacatgaaaaggaacagtcacttttttttcgtaggagcttactgtttctgaactgttcaggcgcaaaagaataaaggcctttgtatttcgctgtgcctcaaaggaaatggctccgtctgccgcagcatatcctttttcaatcgcttcgtcagtccaatccattacaggaggtgtagaatccttttgaaatacagtaaattgatgatatgaaatcgaaagttcttgcggcttccatgatttgatcaatgtgctgttcctcctctatgtactgtttactgaattgtgaataaaacctttgtgccgtctgggtaatcggtaagctgatgcccgacccaagagcctgctccgcggttgtcagcgggagaaatgtattctacagaagctccctcaccgccttctttgcacatggccattggccattcatctctgtcatacccctttttggaaggtacgtcctttaatgattgctcgcggcgttcctcagctccgtctctgtcaatagtgcacacctctgagtgcccctcatttatcgcatccttaatatgcttggcagtttcgggataacggtcagaaggaaaggtgattgtttcatcatattctttcgtttgagacgttttttgatcagctgagaaaaagtctccttttatcaggccgacagctgcagctgctatgatgacgatgacgagaagtatcgtttttatgatgtccgtcgtgatgttcacctcccgcttttaaaactgacacaagagtaatccagaaagcatttggtgtaaaggtttaaattttatgttttacgatcagtttattgcagaaatcgtaattttagcagatcgaaatatttgttttcagcaaaatacgattgccaatttacaataatgatagtaagtcatcagccgttttcggcttgattaatcattttaaattggcttatgataccggtaagctcctcagctaattgagaaagtgtttcagaagctgcggtaatctcctccattgcagcaaattgctcctctgttaatgcagccgcttgccgggtatttttagtagattctttaatgtcggccgtattggctgcaaaggaatcatttatttgatgtgcactggctgaaatgtttgttacagatgctgataaatcactaatctcggcgctgatttcacctgttgcagctgcaatttccttaaatgcatctctggtgcgctggatcatggtgactccttctgcagcttctgttttcacatgctcaacagatcttgcagaccggttcatatccttttgtatttctatgatcagttttgaaatctgccccgcagactgttgagactcttctgctaatttccgtacttcatcagcaacaacagcaaagccttttccttgttcaccggctctggcagcttcaatcgctgcattcagcgcaagcaggtttgtctgatcagcaatttgggtgatgaccgataaaatttgctcaatttgtttagagcggccgtctaactggtgtatgatttctccgcttttctgaattgactggtgaatcgcatccatttgcgcctgtacatttgcaatttccttttgtccaatgtctgcttttgattgagcgagctgccctttgtcagcgatagcggcagtatttgcagaaatatcccggatgtctgctgaagcttgttttaatgagctttcactattttcaattcgggtgatctgatcttgggctccatttgcaatctgctgtacagcttctgtgattttttctgaagcttgatttgtttcctctgctccggctgagagctgctgagaggctgacgcaagctgaagggctgattgttgtacggtttgtatggtatcgttcagcttcattctcatcttattataatagacgcttagttctgaaagctcgtcaccggttttgtctgacacctctattgtcatatctccgtttccggcactttcaaaggcgctttttaaagcgttcagccgcttgttgatttttctggtgaaaaccaaaacaaggatgactgatactataatgacgataacaagaacgatagcgaattgagtgaaaagtgattgtgtaagtgatgctaaaatactttgattagctccggtatacagcatgccgatgatgttgccattttgatcttttaacggcatgtatgcagtctgataagaagaacctgctacatctgcttgtccgtaaaaacgctttcctttctttaaaacagcggcaataacttcagaagaagcctgggtgccgacagctctttcgccattcttcatgacattggttgcaacacgagtatcgccttggaaaatggtaatggtatcacctgtcttttcaccaagcagatcaacaatatcttcatttccattgatttgtgtttgccctttatagagcttattgtttttcacctgccagtcgcctgacatgacatcatcaatataagtgctgcttaaagcgagatcacctttcgctttttcagttgccatttgtttcatgttttctgtaatttccttaagcatcacagtgccaactgatgccgaaaacaaaagaatcaccacgaaaacgaggcaaagaattttagttcctagcttcatcttaaatcgttttatcaacataattcctccctttacgatttgcaggtcatattacttatcgggtttttgggtttaaagttttattttagaaaaaataaaaccgacctgatcttcaggccggttgtgtgatgctattcaaggtttgcgtggtgagtgaacatagtttcagaatcgagtccttttttctccatgagttttaaaatcactgcatcatagaatagcagcaaagtttgttcaaataatgatcccattggctgaatggttttatagcttccgtttgactggtctttaggagaaccaggcattctgatgatgaggtccgcttgttttccgatgcttgattccggattgatggttaaagcggcaacaattccgtgtaagctttttgcttttgctgcggtatgaatcaagctttttgtctcgcctgatcctgagccgataataactagatctcctttggcgagcggcggagtgagaatctcacctacaatatgggcgttgaagcccatgtgcatcagtctcatcgcgaaggattttgccatcaggccagaccgccccgcacccgcggtgaaaatttggtgggatgaaagaatgtgatcggcaagctggtcagcttcttcattagaaatataagctactgaattgtgtaactcattgagaatttccgctacgtattcagtcgttttcataggagttatccttggacaatcagctgcttcatttttgaagctgtttccgccttatcagctgcgcttgtaattccgcccccaacaatgacaaggtcagggttttgcttgatcacttctggcagtgtatcaagtttgatgccgcccgcgattgcggtttttgcgttttttacggtatttttgattgtcgttaattcttcgaaagagtttttgccctctgcttgaagatcatagccagtgtggacgcagatgtagtcaacgcctagtgcgtcaatttctttcgcacgggattcgatatctttcacgttaatcatgtccactaagattttcttcttttgttttttggcttcttctactgcgcctttaatcgttgcatcgtctgtagcccctaaaacggtgatgatgtcagcgcctgcttccgacgctttcataatttcgtagcctccggcatccatgattttcaggtctgcaagaaccttcaattgaggaaatgcttcttttatttctttaacggctcttaggccttcattgatgacgaccggtgttccgatttcaactacgtcgatgtattgttctacctctttgacgagctcaatggcttccgggatgttgacgaggtctaatgcaagctgtaattccattgttgattcactccctttttcgaattatttttcattctataggttctcttatttgatgagaagtaggcactttgaagtcaacaagttacttggaggatactgtgaggagagacaatcagatttctttcgcttgattttatgagtgagtataatgaaaaaagagtctgcaaaaaagtaagtaagtgatgatacgtatctaacatacaaaaagattactaaggggggattctattgagccggatggacgacaaaaggtttaattgtgagaaggaattaacgcttgcagtgattggcggtaaatggaagatgctcattttatggcatttaggaaaagaaggcacaaaacggttcaatgaattaaaaacattgattcctgatattacgcagaagatcctcgtgaatcagctgagagaacttgagcaggatatgattgttcacagggaagtgtatccggttgtcccgccgaaggttgagtattctctgaccccgcatggagaaagcctcatgcctattcttgaagccatgtatgagtgggggaaaggctatatggaattgattgatatcgacaaaaatgtcatgaaagaatcgttgtaagacgctcttcgcaagggtgtcttttttttgcctttttttcggtttttgcgcggtacacatagtcatgtaaagattgtaaattgcattcagcaataaaaaaaaattgaacgcagcagtttggtttaaaaatttttatttttctgtaaataatgtttagtggaaatgattgcggcatcccgcaaaaatatccctgtaaataaactggaatctttcggcatcccgcatgaaacttttcacccatttttcggtgataaaaacatttttttcatttaaagtgaacggtagtaagataaaaaatattgaaaacaatgaataaatagccaaaattgtttcctgttaggataggggttcttgcggtctttatccgcttatgttaaacgccgcaatactgactgacggctgcccgttttaatagcggcaatctgttttttgtttggaagcactgctttttaagtgtagtactttgggctatttcggttgttagttcataagaattaaaagctggtatggataaaaaagagaaaatgctctgcacaagttcactgtttatgaagactaggggaggtatgaaaatatggaaataactttttatcctttaacggatgcacaaaaacgaatttggtatacagaaaaattctatcctcacacgagcatttcaaaccttgcggggattggtaagctggtttcagctgatgcgattgattatgtgcttgttgagcaggcgattcaagagtttattcgcagaaatgacgccatgcgccttcggttgcggctagatgaaaacggggagcctgtacaatatattagcgagtatcggcctgttgatataaaacatactgacactactgaagatccgaatgcgatagagtttatttcacaatggagccgggaggaaacgaaaaaacctttgccgttgtacgattgtgatttgttccgtttttccttgttcaccataaaggaaaatgaagtatggttttacgcaaatgttcatcacgtgatttctgatggtatctccatgaatattctcgggaatgcgatcatgcacatttatttagaattagccagcggctcagaggcaaaagaaggaatctcgcattcatttatcgatcatgttttatctgaacaggactatgctcaatcgaagcgatttgaaaaggacaaggcgttttggaacaagcaatttgaatcggtgcctgaacttgtttccctgaaacggaatgcttccgcaggaggaagtttagatgctgagaggttctctaaagatgtgcctgaagcgcttcatcagcagattctgtcgttttgtgaggcgaataaagtcagtgttctttcggtatttcaatcgttgctcgccgcctacttgtacagggtcagcggccagaatgatgttgtgacgggaacctttatgggcaaccggacaaatgcgaaagagaagcagatgcttggcatgtttgtttctacggttccgcttcggacaaacattgacggcgggcaggcgtttttagaatttgtcaaagaccggatgaaggatctcatgaagacactccgccaccaaaagtacccgtataatctcctgatcaacgatttgcgtgaaacaaagagctctctgaccaagctgtttactgtttctcttgaatatcaagtgatgcagtggcagaaagaagaggatcttgcctttttgactgagccgattttcagcggcagcggattaaatgatgtctcaattcatgtaaaggatcgatgggatactgggaaactcaccatagattttgattaccgcactgatttattttctcgtgaagaaatcaacatgatttgtgagcgcatgattaccatgctggagaacgcgttaacgcatccagagcataccattgatgaattaacgatgatttctgatgcggagaaagagaagctgcttgcgagggccggcggtaaatctgtgagctaccgtaaggacatgacgatcccggaactgttccaagaaaaggctgagcagctttcagatcatccagcggttgtattcgaagatcgtacattgtcctatcgaacgttacatgaacaatccgcacgcatcgccaatgtgctgaaacagaaaggggttggcccggacagtcctgtcgcggttttgattgaacgttctgaacggatgattacagctatcatgggaattttaaaagccggcggagcctatgtgccgattgatccgggttttcctgcagagcggattcaatatattttggaggactgcggggcggacttcatcctgactgaatcgaaggttgcagcgcctgaagccgatgctgagctgattgacttagatcaggcaattgcggaaggtgcagacgatatgacggaggctgatgtaaacgcgcggaatcttgcctacattatttacacatcgggaacaaccggacgtccgaaaggcgttatgatcgagcatcgccaggttcatcatttggttgaatctctgcagcagacgatttaccaaagcggcagccaaaccctgcggatggcattgcttgcgccgttccactttgatgcgtcagtgaagcagatcttcgcgtcgcttcttttgggacaaaccctttatatcgtaccgaagaaaacagtgacgaacgggaccgcccttgctacatattatcggagaaacagcattgaggcgacggatggaacaccggctcatttgcaaatgctggcagcagcgggcgattttgaaggcctaaaactgaagcacatgctgatcggaggagaaggcctgtcatctgttgttgcggacaagctgctgaagctgtttaaagaagccggcacagcgccgcgtttgactaatgtgtacgggccgactgaaacgtgcgttgacgcgtctgttcatccggttatccctgagaatgcagttaaatcagcgtatgtgccgatcgggaaagcgctggggaataaccgcttatatattttggatcaaaaaggccggctgcagcctgaaggcgtggcgggtgagctttatatcgcgggagacggtgtgggccgaggctatttgcatttgcctgaattaacggaagagaagtttttacaagatccattcgtgccgggcgatcgcatgtaccggaccggggacgtggtgcgctggcttccagatggaacaatcgaatatttaggcagagaggatgaccaggtcaaagtccgcggataccggattgagcttggggaaattgaagccgtgattcagcaggcgccagacgttgcaaaagccgttgttttggcacgccctgacgaacagggaaatcttgaggtttgcgcatatgttgtgcagaagcctggaagcgaatttgcgccagccggcttgagggagcatgcggccagacagcttcctgactatatggtgccggcttactttacagaagtgacagaaattccgcttacgccaagcggcaaagtcgaccgccgcaagctgtttgcactagaggtgaaggctgtcagcggcactgcctatacagcgccgcgaaatgagactgaaaaagcaatcgcagccatttggcaggacgtgctgaacgttgagaaggcggggatttttgacaatttctttgaaacgggcgggcattcattgaaggccatgacccttttaacaaagattcataaggaaacaggcatcgagattccgcttcaatttttgtttgagcatccgacgattgcggctcttgcagaggaagctgatcacagagaaagccgggcattttcggtgattgaacctgctgaaaaacaggagcattatccgctttctctggcacagcagcgaacatatatcgtcagccagttcgaggatgcgggagtcggctacaacatgcctgcggcagcaattctggaagggcctttagatattcaaaaactggagcgcgcatttcaggggttaatccgacgccacgagtcattgagaacatcatttgttcttgaaaacagcacgccgagacagaacattcacgatagcgttgatttcaacatcgaaatgattgaaagaggcggccgctcagatgaggcaattatggcttcattcgttcggacatttgatttggcgaaagctccgctgttcagaatcggtttgctggggcttgaagagaaccgtcatatactgctgtttgatatgcaccatttgatttctgacggtgtatccattggcattatgctggaggagttagcacgcatttataaaggcgaacagcttcctgagcttcgtctccagtataaggactacgctgtatggcaaagcagacaggctgctgaagggtacaagaaggaccaggcttattggaaggaagtctttgcaggcgagctcccggtgcttcagcttctgtccgattacccaagaccgcctgttcaaagctttgaaggggatcgggtgtcaatcaagctggatgcgggggtaaaggatcgcctcaatcgtttggctgaacaaaacggcgccactttatatatggtgatgctgtccgcttactatacgcttttgtcaaagtatacggggcaggatgacatcattgtcgggacaccgtcagcgggcagaaatcactccgatacagagggcattatcgggatgtttgtcaatacgcttgcgattcgcagtgaggtgaagcaagatgagacgtttacccaattgatctcgcgtgtccgcaaacgggtgctgaatgccttttctcatcaggactatccgtttgagtggcttgttgaagatttgaacatcccgcgtgatgttagcaggcatccgctgtttgacacgatgttcagccttcaaaacgcgacagcaggcattccggctgtcggcgatctgtccttgtctgttcatgagaccaatttcaagattgccaaatttgatttgaccgtgcaggcgagagaaaccgatgaaggcattgagcttgatttggattacagcacaaagctgtttaaacaaagcacggcaaacaggctgcttacgcattttgcgcgtttgcttgaagatgctgcggctgatccagagaagccgatttctgagtataagcttctttctgaagaggaggccgcttcgcaaattcagcagtttaacccgggcagaacaccttatccgaaagataaaacaattgttcagctgtttgaggagcaagcggcgaatacgccagaccatactgcgcttcaatatgaaggcgaatcactcacttatcgtgaactgaatgaacgggccaatcgtttagcccgcggcattctttctcttggagctggcgaaggcagaactgcggctgtcttatgcgagcggtcaatggatatgattgtgtcgatcttggcagtattaaaatcaggttcggcttatgttccgattgatccggaacatccgagtcagcggatgcagcatttcttccgtgacagcggagcaaaggtgcttctcactcagagaaaattaaaggctttagcggaagaagcggaatttaagggcgttatcgtgctagccgatgaggaagagagctatcatgccgatgcgcgcaatctcgcactgcctcttgattctgaagcaatggccaacctgacgtatacctctggaacgactggaacacctaaggggaatatcgtgacacatgccaatattctccgcacggtgaaggaaacgaattatctcagcattacagaacaggatacgattctcggtctttccaattacgtgtttgacgcgtttatgttcgatatgttcggatctttgttaaacggagccaagctggtgctgataccgaaggaaaccgttttggacatggctcgtctgtcccgcgtcattgaacgggagaatatcagcattctcatgattacaaccgctttgttccacttgcttgtggacttgaatccggcgtgcttgtcaacgcttcgcaagattatgtttggcggggaacgggcttcggttgagcatgtcagaaaagctttgcaaacggttggaaagggcaagctccttcacatgtatggaccgtctgaaagcacggttttcgcgacgtatcatccggttgatgaattggaggagcacacgctgtctgttccgattggaaaaccggtcagcaatacggaagtatacattcttgacagtacgggacacgtgcagcctgccgggattgccggagagctttgcgtcagtggcgaaggactcgtgaaaggctattacaaccgtccagaactgactgaggagaaatttgttccccatccgtttacatccggcgaacgcatgtataaaacgggagaccttgctagatggctgccgaatggcgacatcgaatttatcgggcgaatcgaccatcaggtgaagattcgcggacagcgcatcgaacttggagaaatcgaacatcagctgcaaacccatgatcgtgttcaggaaagtgttgtgcttgccgttgatcaaggagcgggagataaactgttgtgtgcttattatgtcggagagggagacatctcatcacaagagatgagagagcatgctgcgaaggacttgccggcatatatggttcctgcggtgtttatccaaatggacgagctgccgctgacagggaacggaaaaattgaccggagagcgctgccgattcctgatgccaacgtttcaagaggtgtttcatatgttgcgccacgcaatggaacggaacaaaaagtcgcagacatttgggcacatgtgcttcaggcagaacaagtcggcgtttatgaccacttctttgacattggcggacattcattagcaggcatgaagatgcttgccttggttcatcaggaactgggcgttgagctgtcactcaaggatctcttccagtcaccgacggttgagggcttggcacaggtgattgcctctgctgaaaaagggacagccgcaagtatcagcccggcagagaaacaagatacgtatcctgtttcttcaccgcaaaaacggatgtacgtgcttcagcagcttgaggatgcgcaaacgagctataacatgccggcggttctgcgcctgacaggtgagcttgatgttgaaaggcttaacagcgtcatgcagcagttaatgcagcgtcatgaagccttgagaaccacgtttgaaataaaagatggagaaacggtgcagcggatctgggaagaggctgagtgtgagatagcctatttcgaagccccggaagaagagacagagcggatcgtttctgagtttattaagcctttcaaaatcgaccaacttccactgttcagaatagggcttatcaagcattcagacactgagcatgtgctgctgttcgatatgcatcatattatttctgatggtgcatctgtcggtgtgctgattgaggagctttcaaagctgtacgacggagaaacccttgagccgctccgtattcaatataaggattatgctgtgtggcagcagcagttcattcagtctgagctttacaagaagcaagaagagcattggctgaaggagctggacggagagctgccggtgctgacgcttccgaccgattacagtcggcctgccgttcaaacatttgagggagaccgcattgcattttcattagaagcaggcaaagctgatgctctgcgcaggcttgcaaaagaaacggattccacgctttacatggtgcttctggcttcatacagtgcatttttatcaaaacttagcgggcaagacgatatcatcgtcggttcacctgtggccggacgatctcaagcggacgtcagccgcgtcatcggaatgttcgtcaatacattggcgctgcgcacgtatccgaagggtgaaaagacgtttgctgactatcttaacgaagtgaaagaaacggcactcagcgcttttgatgcgcaggattacccacttgaggatttgatcggaaatgttcaggttcagcgtgacacaagcagaaatccgttattcgatgcagttttttcaatgcaaaatgcgaatataaaggatttaacaatgaaagggattcagcttgagccgcatccgtttgaacggaaaacagccaagtttgacctcacgctgacggctgacgaaaccgacggagagcttacattcgtactcgaatacaatacagctctgtttaagcaggaaacgattgaacgatggaagcaatattggatggagcttttagatgatgttactgggaacccgaaccagctgctttccagcctgtcactggtcaccgagacagaaaagcaagcgcttcttgaggcatggaagggcaaagcgctgcctgtgccgacagacaaaacggttcatcagctattcgaagagactgtccagcgccacaaagaccgcccggctgtcacatacaacggccagtcttggacgtacggcgagctgaatgcgaaggcgaaccgtctcgcgcggattctgatggactgcggcattagcccggatgaccgcgtcggcattctcacgaagccgtcgcttgaaatgtccgccgcggtgctcggcgtcttgaaagccggagcggcgtttgtgccgattgatcctgactacccggatcagcggattgagtatattttacaggacagcggcgcgaagcttctcttgaaacaggaagggatttcagtgccggacagctttacgggagatgtcattcttctcgatggaagccgcacgattctaagcctgccgcttgatgaaaacgacgagggaaatccagaaaccgctgtaaccgcggagaacttggcgtacatgatttacacgtctggaacgaccggacagccgaagggtgtcatggtcgagcaccatgcgcttgtgaacctgtgcttctggcaccacgacgcgttcagcatgacagcggaggaccgcagtgcgaagtacgcgggctttgggttcgacgcttccatttgggagatgttcccgacctggacgatcggtgccgagcttcacgtcattgatgaagcgatccgcctcgatatcgtccgcctgaacgattattttgaaacgaacggcgtaacgatcacgttcctgccgacacagcttgcggaacagttcatggagcttgagaacacatcacttcgcgtattgctcattggaggagacaagctgaagcgcgcagtgaaaaagccgtacacactcgtcaacaactacgggccgacagagaatacggtcgttgccacaagcgcagaaatccatccggaggaaggctcgctttccatcggaagggccattgccaatacgagagtatacattctcggcgagggcaatcaggtgcagccggaaggcgtagccggagagctttgcgtggcggggcgcggactggcacgcggctatctgaatcgagaagacgaaaccgcgaagcggtttgtcgctgatccgtttgtgcctggtgagcgcatgtaccgcaccggcgatttggtgaaatggacgggcggcggcatcgaatacatcggccggatcgaccagcaggtcaaggtccgcggctaccggatcgagctctcagaaattgaagtccagctcgcacagctttctgaggtgcaggatgcggcggtgacagctgtcaaagataaaggaggcaacacagcgatcgcggcgtatgtcacaccggaaacagctgacatagaagcactgaaatcagcactaaaggaaaccctgccggattacatgatcccggcgttctgggtgacgctggacgagcttccggttacggcaaacggcaaagtggaccgtaaagccttgcctgagccggacatcgaagcgggaagcggagaatacaaagcgcctacgaccgacatggaagagctgcttgccggcatctggcaggacgtgcttggaatgtctgaagtcggtgtcaccgacaatttcttctcgcttggcggagattccatcaaaggaattcaaatggcgagccgcttgaaccagcacggctggaagctggaaatgaaagatctcttccagcacccgacgatcgaagagctcacccagtacgtagagcgtgccgaaggcaaacaggcagaccaaggcccggtagagggcgaagtcatcctgacgccgatccagcgctggttctttgaaaagaacttcacgaacaagcaccactggaaccaatcggtgatgcttcacgccgcgaagggctttgaccctgaacgggtggagaaaacattgcaggcgctgatcgagcatcatgacgcgctccgtatggtctatcgtgagggactggaagacgtcattcaatacaacagaggtcttgaagctgcttccgctcaattggaggtcatccagattgagggccaagctgcagattacgaagaccgtatagagagagaagcggagcgtttgcaaagcagcatcgacttgcaggaaggcggcttgttaaaagcaggattgttccaagcggaagacggagaccacttgcttcttgccattcaccacttagtggttgacggcgtgtcgtggcggattttactggaggatttcgccgcggtatatacacagcttgagcaaggcaatgaaccggttctcccgcagaaaacacattcatttgcagagtatgcagagagattgcaagacttcgcgaactccaaagcctttttgaaagaaaaagagtattggagacagctcgaagaacaagctgtcgcggcaaagcttccgaaagaccgcgaatctggtgatcagcgaatgaaacatacaaagacaattgaattctcgctgactgctgaagagacagaacagctcaccacaaaggtgcatgaggcatatcacacagaaatgaatgatattttgctgacggcattcggattggcaatgaaggagtggacgggtcaagatcgagtaagtgttcatttagaggggcatggacgtgaagaaatcatagaagacctgaccatttctcgcacagtcggctggtttacaagtatgtacccaatggtgctcgatatgaagcatgcggatgatctgggctaccagctgaagcaaatgaaagaagatatcagacatgtgccgaataagggagtcggatacggcattctgcgctatctgacggcacccgaacataaagaagatgtggcgttctcgattcagccggatgtcagcttcaactatttaggtcagtttgacgaaatgtcggatgcaggtttgtttacgagatcagagctgccatcaggacagtcattaagccctgaaacagaaaaaccgaatgcgctggatgttgtcggatatatcgaaaacggaaaactgacgatgtcactggcctatcattctcttgaatttcatgaaaaaacagtacaaacattcagtgacagctttaaagcgcatcttctcagaatcattgaacattgcctatctcaagacggtacggaactgaccccgagtgatcttggtgacgacgatttgacgctggatgagctggataaattaatggaaattttctaatagaggtggcatatgagcaaaaaatcgattcaaaaggtgtacgcactgacaccgatgcaggagggaatgctgtatcatgcgatgcttgatccgcattcttcctcgtacttcacacaattagagcttgggattcacggcgcttttgatcttgaaatctttgagaaaagcgtcaatgaactgattcggtcatacgatattctccgtacggtatttgtgcatcagcagctgcaaaaaccgcgtcaggtcgtgttagcggaacgcaaaacaaaggtgcattatgaggatatcagtcatgcagacgagaaccgccagaaagagcacattgagcgttacaaacaagacgttcagcgccaaggctttaacctggcaaaagacatattgttcaaggtagcggttttccgccttgatgcagatcagctgtatcttgtctggagcaatcatcatattatgatggacggctggagcatgggcgtcctcatgaaaagcctgttccaaaactatgaagcgctcagagcaggaaggacacctgcaaacggtcaaggcaagccttactccgactacatcaaatggcttggaaaacaggacaatgaagaagcggagagctactggagcgagcgcttggcgggttttgaacagcccagcgtgctcccgggccgcctgcctgtaaaaaaagacgaatacgtcaataaagaatattcctttacatgggacgaaacactggttgcccgcattcagaaaaccgcaaaccttcatcaagtgacagggcctaacctatttcaggccgtttgggggattgttctcagcaaatacaactttacggatgatgttgtcttcggaacggtcgtctcaggaaggccgtctgaaatcaatggaattgaaacgatggcggggctgtttatcaacaccattccagtgcgggtgaaagttgaacgagatgctgcattcgctgatattttcacagctgttcagcagcatgcagtagaggcagagcgttacgattacgtgccgctctatgagattcaaaaacgctcagctcttgatggcaatctcttaaaccatcttgtcgcgtttgaaaattatccgcttgatcaagagcttgaaaacggcagcatggaagaccgcctcgggttttcgattaaggtagaaagcgcatttgaacaaacgagcttcgatttcaacctgattgtgtatccgggcaaaacgtggaccgtcaaaattaaatataacggagccgcctttgattccgcttttatcgaacggacagcggagcaccttacccgcatgatggaagcagctgtcgatcagccggccgcttttgtgcgtgagtacgggcttgtgggagacgaagagcagcggcaaattgtcgaggtgtttaacagcacgaaagccgaactccctgcaggaatggctgttcaccaagtgtttgaagagcaagcgaaacggacgccggcgagcactgccgtcgtatatgaaggaaccgtgctgacgtaccgcgagctgaatgcagcggctaaccgtctggcgagaaagcttgtcgaacaaggccttcaaaaaggggaaacagcagcgattatgaacgatcgatcagtagaaaccgttgtcggcatgctggctgtgttaaaagcaggcgccgcatatgtgccgcttgatccagcgcttccgggggatcgtcttcgtttcatggcagaggacagctccgttcgaatggttttgaccggaaattcttatacagggcaggcacatcagctgcaggtgccggttcttacactggacataggcattgaagatggcgaagctgacaatctcaacctgccatccgccccgtctgatttggcgtacatcatgtacacatccggttcaacgggcaaaccgaaaggcgtcatgatcgaacataaaagcattctgcgcctcgtcaaaaatgccgggtacgttcctgttactgaagaggaccgcatggcgcaaacaggggcagtcagctttgatgccggaacgtttgaggtattcggcgcactgctgaatggcgcagcgctttatccggtcaaaaaagagacactgcttgatgcgaaacaatttgctgcattcctgcgtgagcaaagcatcacaactatgtggctgacatcacctttattcaaccagcttgctgcaaaggatgcgggtatgttcggcacactgcgccatttaatcatcggcggagatgcccttgtcccgcatattgtcagcaaagtaaaacaggcatcgccgtcgctttcattgtggaacggatacggcccgacagaaaacacgacgttttcaaccagttttctgatcgaccgcgagtatggcggctctatcccaatcgggaagccgatcggaaattccactgcctatattatggatgagcagcaatgcctgcagccaatcggcgcgcctggtgagctttgcgtaggcggaatcggtgtagcgcgtgggtatgtcaatctccctgagctgacggagaagcaatttctggaagacccgttcagaccgggtgagagaatttaccgcactggtgacttggcaagatggctgccggacggcaatatcgaatttttaggcagaatcgacaaccaagtgaaggtgcgcggcttccgaattgagcttggcgaaattgaaacaaaactgaacatggctgagcatgtgacagaagccgcggtgatcatccgcaagaacaaagcagacgaaaatgaaatttgcgcgtacttcacggcggatcgtgaagtggctgtgagtgagctgagaaaaacactgtctcagtctttgcctgactatatggtccctgcccacctgattcaaatggacagcctgccgctcacgccaaacgggaaaatcaacaaaaaggaactgcctgcaccgcaatcagaagccgtgcagccggaatacgcagcaccaaaaacagagagtgaaaagaaattagcggagatctgggaaggaatactcggcgtcaaagcaggcgttaccgataacttctttatgatcggcggccattctttgaaagcgatgatgatgacggcgaaaattcaagagcattttcataaggaagttccgataaaagtgctttttgaaaagccgactattcaagaactggcactgtatttggaagagaacgaaagcaaggaggagcagacgtttgaaccgatcaggcaagcatcttatcagcagcattatcctgtatccccggcccagcggagaatgtatatcctcaatcagcttggacaagcaaacacaagctacaacgtccccgctgtacttctgctggagggagaagtagataaagaccggcttgaaaacgcgattcagcaattaatcaaccggcacgaaatcctccgtacatcgtttgacatgatcgacggagaggttgtgcaaaccgttcataaaaacatatcgttccagctggaggctgccaagggacgggaagaagacgcggaagagataatcaaagcatttgttcagccgtttgaattaaactgcgcgccgctcgtccgttcgaagcttgtccagctggaagaaaaacgccacctactgctcattgatatgcatcatattattactgacggcagttcaacaggcattctaatcggtgatcttgccaaaatatatcaaggcgctgatctggaactgctacaaattcactataaagattacgcagtttggcacaaagaacaaactaattatcaaaaagatgaggaatactggctcgatgtctttaaaggcgaactgccaatactggatcttcccgcggatttcgagcggccagctgaacggagctttgcgggagagcgcgtgatgtttgggcttgataagcaaatcacggctcaaatcaaatcgctcatggcagaaacagatacgacgatgtacatgtttttgctggcggcgttcaatgtactcctttccaagtacgcgtcacaggatgatatcattgttggctcgccgacagctggcagaacacatcctgatctgcaaggtgtgccgggtatgtttgtcaacacggtggcactcagaacggcaccagcgggagataaaaccttcgcgcaattccttgaagaggtcaaaacagccagccttcaagcattcgagcaccagagctatccgcttgaggagctgattgaaaagcttccgcttacaagggatacaagcagaagtccgctgttcagcgtgatgttcaacatgcagaatatggagattccttcattaagattaggagatttgaagatttcctcgtattccatgcttcatcatgttgcgaaatttgatctttccttggaagcggtcgagcgtgaagaggatatcggcctaagctttgactatgcgactgccttgtttaaggacgagacgatccgccgctggagccgccactttgtcaatatcatcaaagcggccgcggctaatccgaacgttcggctgtctgatgtagatctgctttcatctgcagaaacggctgctttgctagaagaaagacatatgactcaaattaccgaagcaacctttgcagctctttttgaaaaacaggcccagcaaacacctgaccaccctgcggtgaaggctggcggaaatctgctgacctatcgcgagcttgatgaacaggcgaaccagctagcgcatcatcttcgtgcccaaggggccggaaatgaagacattgtcgcgattgttatggaccggtcagctgaagtcatggtatccattctcggtgtcatgaaggcgggggcagctttccttccgattgatcctgatacacccgaagaacgaatccgttattcattagaggacagcggagcaaaatttgcggtcgtgaatgaaagaaacatgacggctattgggcaatatgaagggacaatcgtcagccttgatgacggtaaatggagaaatgaaagcaaggagcgcccatcatccatttccgggtctcgcaatcttgcatacgtcatttatacgtccggtacgaccggaaagccaaagggcgtgcagattgagcatcgcaatctgacaaactatgtctcttggtttagtgaagaggcgagcctgacggaaaatgataagactgtattgctttcatcttacgcatttgaccttggctatacgagcatgttccccgtacttctgggcgggggcgagctccatatcgtccagaaggaaacctatacggcgccggatgaaatagcgcactatatcaaggagcatgggatcacttatatcaaactgacaccgtctctcttccatacaatagtgaacaccgccagttttgcaaaagatgcgaaatttgaatccttgcgcttgatcgtcttgggaggagaaaaaatcatcccgactgatgttctcgccttccgtaagatgtatggacataccgaatttatcaatcactacggcccgacagaagcaacgatcggcgccatcgccgggcgggttgatctgtctgagccggatgcatttgcgaaacgcccgacaatcggacgcccgattgcgaatgccggcgcgcttgtcttaaatgaagcattgaagcttgtgccgccgggagcgagcggacagctctatatcacgggacaggggcttgcgagagggtatctcaacaggcctcagctgacagccgagagatttgtagaaaatccatattcgccgggaagcctcatgtacaaaaccggagatgtcgtacgaagactttctgacggtacgcttgcatttatcggccgggctgatgatcaggtgaaaatccgcggctaccgcattgagccgaaagaaattgaaacggtcatgctcagcctcagcggaattcaagaagcggttgtactagcggtttccgagggcggtcttcaagagctttgcgcgtattatacgtcggatcaagctattgaaaaagcagagctccggaagcagctttccctaacactgccgtctcatatgattcctgctttctttgtgcaggttgacgcgattccgctgacggcaaacggaaaaaccgacagaaacgctttgccaaagccgaacgcggcacaatccggtggcaaagccttggccgcaccggagacagcgcttgaagaaagcttatgccgcatttggcagaaaacgcttggcatagaagccatcggcattgacgacaattttttcgatttaggcggccattcattaaaagggatgatgctgattgccaacattcaggcggaattggagaaaagcgtaccgcttaaagcactgttcgagcagccgactgttcgccagctggcggcttatatggaggcgtctgctgtttcaggcggccatcaagtcctcaaaccggctgacaagcaggatatgtatccattgtcatccgcacagaaacggatgtacgtgctcaatcagcttgaccgccagacgataagctacaacatgccatctgttcttctaatggaaggagagcttgatatttcgtgcctgcgcgattcactcaatcagcttgtgaaccgtcacgaatcattgcggacgtcatttatggaagctaatggtgagcctgttcagcgcatcattgagaaggcggaggttgatcttcatgtgtttgaagccaaagaagacgaagcggaccaaaagattaaggaatttatccggccattcgacttaaacgacgcaccgctcattcgcgcagctttgcttcgaatagaagcgaaaaaacatttgctgcttttagatatgcatcatatcatcgcagacggcgtctcaagaggcatttttgtaaaagaattggcgctgctttacaaaggagagcagcttccggagccggcgcttcattataaagatttcgccgtttggcaacatgaagctgagcaaaaagaacggatgaaggagcatgaggcgtactggatgtcagttctttcaggcgagctgccagagcttgatctcccgctcgattacgcccgtccgcctgtgcaaagctttaaaggagatacgatccgtttccgtacgggaagtgagacggcaaaggcggtagaaaaactgcttgcggaaaccggaacgaccttgcacatggtgctccatgctgttttccacgtctttttaagcaaaatttccggacagcgggatatcgtcatcggctccgttactgccggccggacgaatgctgatgttcaggacatgccgggaatgttcgtcaatacacttgccctgagaatggaagcgaaagaacagcaaacatttgcggagcttttggagcaagcaaagcagacgaacctgtcagcgcttgagcatcaggagtatccgtttgaagatctggttaatcagcttgatctccctcgggatatgagccgaaacccattgtttaatgtgatggtgacgacagaaaaccctgataaagaacagcttacattgcaaaatctgagcatttcaccttatgaggctcatcagggaacttctaagtttgatctgacactgggcggatttactgatgaaaatggcattggcttgcagctcgaatatgcgacagatctgttcgcgaaagaaacagctgaaaaatggagcgaatacgttctgcggctactaaaggctgttgcggataacccgaaccagccgctttccagcctgtcactggtcaccgagacagaaaaacaagcacttcttgaggcatggaagggcaaagcgctgcctgtgccgacagacaaaacggttcatcagctattcgaagagactgtccagcgccacaaagaccgcccggctgtcacatacaacggccagtcttggacgtacggtgagctgaatgcgaaggcgaatcgtctcgcgcggattctgatggactgcggcatcagcccggatgaccgcgtcggcattctcacgaagccgtcgcttgaaatgtccgccgcggtgctcggcgtcttgaaagccggagcggcgtttgtgccgattgatcctgactacccggatcagcggattgagtatattttacaggacagcggcgcgaagcttctcttgaaacaggaaggcatttcagtgccggacagctttacgggagatgtcattcttctcgacggaagccgcacgattctaagcctgccgcttgatgaaaacgacgagggaaatccagaaaccgctgtaaccgcggagaacttggcgtacatgatttacacgtctggaacgaccggacagccgaagggtgtcatggttgagcaccatgcgcttgtgaacctgtgcttctggcaccacgacgcgttcagcatgacagcggaggaccgcagtgcgaagtacgcgggctttgggttcgacgcttccatttgggagatgttcccgacttggacgatcggcgctgagcttcacgtcattgatgaagcgatccgcctcgatatcgtccgcctgaacgattattttgaaacgaacggcgtaacgatcacgttcctgccgacacagcttgcggaacagttcatggagcttgagaacacatcacttcgcgtcctcttgaccggaggagacaagctgaagcgcgcagtgaaaaagccgtacacactcgtcaataactacgggccgacagaaaatacggtcgttgccacaagcgcagaaatccatccggaggaaggctcgctttccatcggaagggccattgccaatacgagagtatacattctcggcgagggcaatcaggtgcagccggaaggcgtagccggagagctttgcgtggcggggcgcggactggcacgaggctatctgaatcgagaagacgaaaccgcgaagcggtttgtcgctgatccgtttgtgccgggtgagcgcatgtaccgcaccggcgatttggtgaaatggacgggcagcggcatcgaatacatcggccggatcgaccagcaggtcaaggtccgcggctaccggatcgagctttcagaaattgaagtccagctcgcccagctttctgaggtgcaggatgcggcggtgacagctgtcaaggataaaggcggcaatacagcaatcgcggcgtatgtcacaccggaaacagctgacatagaagcactaaaatcagcactaaaggaaaccctgccggattacatgatcccggcgttctgggtgacgctgaacgagcttccggttacggcaaacggcaaagtggaccgcaaagccttgcctgagccggacatcgaagcgggaagcggagaatacaaagcgccgacgaccgacatggaagagctgcttgccggcatctggcaggacgtgcttggaatgtctgaagtcggtgtcaccgacaatttcttctcgcttggcggagattccatcaaaggaattcaaatggcgagccgcttgaatcagcacggctggaggctggaaatgaaagatctcttccagcatccgacgatcgaagagcttacccaatatgtagagcgtgccgaaggcaaacaggcagaccaaggcccggtagagggcgaagtcatcctgacgccgatccagcgctggttctttgaaaagaacttcacgaacaagcaccactggaaccaatcggtgatgcttcacgccgcgaagggctttgaccctgaacgggtggagaaaacattgcaggcgctgatcgagcatcatgacgcgctccgcatggtctaccgcgaggaaaacggggacatcgttcaggtgtataaaccgatcggtgagagcaaggtcagcttcgaaatcgtggatctgtacggctccgatgaagagatgctgagaagccagattaagcttctcgcgaacaagctgcaaagcagtctcgatctgcgaaacgggccgcttttaaaggcggagcaatatcgcacagaagctggggatcacctgctcattgctgtacaccatctcgtggtcgacggtgtgtcatggcggattttgcttgaagactttgcttcaggctacatgcaggctgagaaagaagagagccttgtcttcccgcaaaaaacaaactccttcaaggattgggcggaagaactggcggcattcagccaatcagcgcatcttttacagcaggctgaatactggtcgcaaattgccgctgaacaggtttctcctttaccaaaggattgtgaaacagagcagcggatcgtcaaggatacatcatccgtcctatgtgaattaacggaagaagacactaagcatcttttaacagatgttcatcagccatatggaactgaaatcaacgatattcttctcagcgcgctcggtttgacaatgaaagaatggacaaagggggccaaaattggcattaaccttgagggacacggccgggaggacatcatcccgaatgtgaatatctccagaacggtcggctggtttacggcacaataccctgttgtgctcgacatgtctgaagcagatgcctcagctgtgatcaaaacagtcaaagaaaacctgcgccgcattccggacaaaggtgttggctacggcattcttcgttatttcacagaaacagcggaaacaaagggcttcacaccggagatcagcttcaactatttgggccaattcgacagtgaagtcaaaaccgatttctttgaaccgtccgctttcgatatggggcgccaagtaagcggagaatcagaggcgctgtacgcattaagcttcagcggcatgatcagaaacggccggtttgtgctttcctgctcctacaatgagaaggagtttgaaagagctacagtcgaggagcaaatggaacggtttaaagaaaacctcctgatgctaatccgccattgcacggaaaaagaagacaaggaattcacaccaagcgacttcagcgccgaagaccttgaaatggacgagatgggagatatctttgacatgcttgaggagaatttaaaataaaacgcaagggaattacagaaggcgggagcgaaacatatgagtcaatttagcaaggatcaggttcaagatatgtattacctatcgccgatgcaggaagggatgctttttcatgccatcctgaatcccggccaaagcttttaccttgaacaaatcacgatgaaagtaaaaggtagcttgaatatcaaatgtcttgaagaaagcatgaatgtgatcatggaccggtacgatgtatttcgtaccgtgttcattcacgaaaaagtaaaaaggcctgtccaagtcgtattgaaaaaacggcagttccaaatagaagaaatcgatctgacacacttaacgggcagcgagcaaacagccaaaatcaatgagtacaaagaacaggataagatcaggggttttgatttgacgcgggatattccgatgcgggcagccattttcaagaaagctgaagaaagctttgaatgggtgtggagctaccaccacattattttggacggatggtgcttcggcatcgtcgtacaggatctatttaaggtatacaatgctctgcgcgaacaaaagccgtacagcctgcccccgtcaaaccgtataaagactacatcaagtggcttgaaaagcaggataaacaagcatcactgcgttactggcgcgagtatttagaggactttgaaggacaaacgacgtttgcggagcaaagaaagaaacaaaaggacggctatgagccgaaagagctgctcttttcactgccggaggcggaaacaaaggcctttaccgagcttgcaaaatcgcagcataccactttaagtacggcgctgcaggcagtctggagcgtattgatcagccgctatcagcagtctggcgatttggccttcggtacagttgtttcagggcgtcccgcggaaatcaaaggcgttgaacatatggtcgggctgtttatcaacgttgtcccgagacgtgtgaagctgtctgagggtatcacatttaacggcttgctcaagcagctgcaggagcaatcgctgcagtctgagccgcaccaatatgtgccgctttatgacatccaaagccaggccgatcagccgaaactgattgaccacatcattgtttttgagaactatccgcttcaggatgcgaaaaatgaagaaagcagtgaaaacggctttgatatggtggatgttcatgtttttgagaagtcgaattatgatctcaacctgatggcttcccctggagatgagatgctgattaagcttgcctataatgagaatgtgtttgatgaggcgtttatcctgcgcttgaaatctcagcttctcacagcaattcagcagctcatccagaatcctgatcagcctgtcagcacgatcaacctcgttgacgacagggagagagaatttttgctaaccggcttaaacccgccggctcaagctcatgaaacaaagcctctgacggattggttcaaggaagcagtgaacgtcaatccggatgcgccggcgcttacgtattccggccagaccctgtcttatcgcgaattagatgaggaagcgaaccgccttgcacgccggctgcaaaaacacggtgcgggcaaaggctctgttgtagcgctgtacacgaagcgctcacttgaactggtaatcggcattctcggtgtattaaaggcgggagcagcctatctgccggttgatccgaagctgccagaggaccgaatctcgtatatgctggctgacagtgcggcagcctgtcttctgacgcatcagaagatgaaagaacaagcggctgagctgccgtatacaggcacaacgctcttcattgatgatcaaacacggtttgaagaacaggcaagcgatcctgcaaccgcgattgatcctaatgatccggcatatatcatgtacacgtccggcacaaccggaaagccaaagggcaatatcaccactcatgccaatattcaaggattggtcaagcatgtagactacatggcattctctgagaaagatacattcttatctgtttccaattacgcctttgacgcatttacctttgatttctatgcttctatgctgaatgcggcacggctcattatcgcagatgaacatacgctgcttgatacagaacggctcacagatctgatcctgcaagagaatgtcaatgtcatgtttgcgacaaccgcactatttaatcttctcacggatgcgggagaggattggatgaagggactacgctgtatattattcggcggagagcgcgcgtcagtgcctcatgtcagaaaagcgctgcgggtcatggggccgggcaagctgattaactgctacgggccgactgagggaacagtgtttgcgactgctcacgtcgtgcatgatataccggattccatctcctcattgccgatcggaaagccgatcagcaatgccagtgtttatattctgaacgagcaaagccagctccagccattcggggcgatcggtgaactgtgcatcagcggaatgggcgtgtcaaaaggatatgtaaatcgtgctgacctcacgaaggaaaagtttattaagaacccgttcaagccgggagaaacgctttaccgcacaggggatttagcgcgctggctgccggatggaacgattgaatacgccggccgtattgacgaccaggtcaaaatacgtggacaccggattgagcttgaagaaatcgaaaagcagctgcaggaatacccaggtgtgaaagatgcggtcgttgtggcggaccgccctgagtctggcgatgcatcaatcaatgcctaccttgtgaaccgaacgcagctttcagctgaagacgtgaaggcgcacctgaaaaaacagcttcctgcttacatggtgccgcaaacctttaccttcttggatgagcttcctttaacgacgaacgggaaagtcaataaacggctgctcccaaaacctgatcaggatcagctggcggaagaatggattggaccgcggaacgagatggaagaaacaatcgcacaaatatggtctgaggttctcggcagaaagcaaattggcattcatgacgatttctttgcgctcggagggcattccttgaaggccatgaccgccgcgtcccgcatcaagaaagagctcgggattgatcttccagtaaagcttttgtttgaagcgccgacgatcgccggcatttcagcgtatttgaaaaacgggggccctgatggcttgcaggatgtaacgataatgaatcaggatcaggagcagatcattttcgcattcccgccggtcttgggctatggccttatgtaccaaaatctgtccagccgcttgccgtcatacaagctgtgcgcctttgattttattgaggaggaagaccggcttgaccgctatgcggatttgatccagaagctgcagccggaagggcctttaacattgtttgggtattcagcgggatgcagcctggcgtttgaagctgcgaaaaagcttgaggaacaaggccgtattgttcagcggatcatcatggtcgattcctataaaaaacaaggtgtcagtgatctggacggacgcacggttgaaagtgatgtcgaagcgttgatgaatgtcaatcgggacaatgaagcgctcaacagcgaagccgtcaaacaaggcctcaagcaaaaaacacatgccttttactcatactacgtcaatctgatcagcacaggccaggtgaaagcagatattgatctgctgacttccggcgctgattttgacatgccggaatggcttgcatcatgggaagaagctacaacaggtgcttaccgtatgaaaagaggcttcggaacacacgcagaaatgctgcagggcgaaacgctagataggaatgccgggattttgctcgaatttcttaatacacaaaccgtaacggtttcataaatgaagtgatgaaaggaggagacagccaatgagccaactcttcaaatcatttgatgcgtcggaaaaaacacagctcatctgttttccgtttgccggcggctattcggcgtcgtttcgccctctccatgcttttttgcagggggagtgcgagatgctcgctgccgagccgccgggacacggcacgaatcaaacgtcagccattgaggatctcgaagagctgacggatttgtacaagcaagaactgaaccttcgccctgatcggccgtttgtgctgttcggacacagtatgggcggaatgatcaccttcaggctggcacaaaagcttgagcgtgaaggcatctttccgcaggcggttatcatttctgcaatccagccgcctcatattcagcggaagaaagtgtcccacctgcctgatgatcagtttctcgatcatattatccaattaggcggaatgcccgcagagcttgttgaaaataaggaggtcatgtcctttttcctgccttctttccgatcagattaccgggctcttgaacaatttgagctttacgatctggcccagattcagtcgcctgttcatgtctttaacgggcttgatgataaaaaatgcatacgagatgcggaaggctggaagaagtgggcaaaagacatcacattccatcaatttgacggcgggcacatgttcctgctgtcacaaacggaagaagtcgcagaacggatttttgcgatcttgaatcagcatccgatcattcaaccgtgatcaaaagcggacagcttcggctgttccgctttttttgtgttgaatgccaatttttgcatggtataatagtcgaaatactcaaataaaggcaggtcgaaacatgcgcacgtctcccaggatgaaatggtttgtattgctgtttacgtttgttttcgccatcggaatgaactcattcagaaattcctttcaattttttatgctgccaatggcagatgccttccatgccgacaggtcgctgatctcggtttctgtcagcatttttatgatcacaaccggcatcgtccagttttttgtcggtttttttatcgaccgtttcagtgtcagaaaaattatggcgctgggagctgtctgcatcagcgcaagctttttggtgcttccttattcaccgaatgttcatgtgttttccgccatttacggtgtgcttggcggaatcggctattcctgcgcggtcggcgtgacgacccagtacttcatcagccgttggtttgacacacataaaggtctggcgcttgctattttgaccaatgccaactctgcgggcctgctgcttctctcgcccatttgggctgcggctccgtatcatgccggctggcagagcacctataccattttgggaatcgtcatggcggctgttctgctgccgctcctcgtctttgggatgaagcacccgccacatgcgcaagcggaaactgtgaaaaaatcttatgattggcgagggttttggaacgtgatgaagcaatcccgcctcattcatatcctgtacttcggcgtgtttacttgcggatttacaatgggaattattgatgctcacctcgtcccgatactgaaggatgcgcatgtctctcatgtcaacggaatgatggccgcgttcggggcatttatcatcattggcggattattggcgggctggctgtcagatctcctcggcagcagaagcgtcatgctatccatcttatttttcattcggctgctcagcctcatttgcctgctcattcccattctcggaattcatcacagcgacctttggtacttcgggtttatcctgttattcgggctcagttacacaggcgtgatcccgctgaccgcggcgtcaatttcggaaagctatcaaacaggattgatcggatcgctgttaggcatcaatttctttatccatcaggttgccggagctcttagcgtgtatgcgggcggtttgttttttgacatgactcatggttatttgctgattgtcgctgtgtgcatcgtgtttgtgggtttatcggctgtaatagagctggtgccgtttttagataaacagaaggcaaaagaaacccaccattcaatataaaaggatcagcactgtcaatgctgatcctttttaaatttgagtttttttgtttcggtatttttaaggataatctccttgaatctgttcatctcctcttcggagtgaaaaaaatgtttggggatcgcaatatattggccacttgatgtattgaccctgaagatatttttatattcgaaaacagctgtaatttcatcccaattgaaaatgaggtcatattttttagaacatatacgaattccttcttggttcagagtatatgttcttttagatttcatccgttcgttcttcttgtatgctctggaaaacttcacatatagaagaaggaggagcagcagtgtaaacagaacggacatcacgataatcaacatactgttcataaacaagttaagcgcgtcactgccataaacgatacggggccatccgttaatgaagttaactgcagcaaatatggtgcaaaacaacagaaagtaaaagcatgatatttttgcgatttgataaaaaaagatttctcttacatccttaaaagcgatttctcctggaagattgatactttcactagcatattgaatcatacggtaaacctacacctctaaccatgtttttcctttcagtctagcataatttctcatttttttgcaggcataccagggcgctttgtttttttctccagattgatattgctccccaccacgccaatcataatacaaacagccccggcaagatgataccaggccaggctttcgttgagaatcataactcctgcaatcatcgtcacaatggtagatacatgattaaaagcactcattttaaacgcctcaattcgcgacagcgtatagttagacagaaatgaagtgacaagtgaagacagcacgcccaaatacacaatggcgagaacgaagccgggctcccggaacggcagaaaataagtgccgactgttcccgccgctccgtgacgcacaagggcgatggcgttgaagacgacaaagccgatggctgacatgatgtaggtgagctcggtcagcttgaaccgctgcgtcatttttctggcagcagtattgtacatcgctgaggacaaagcggacaataggatcagcaaagacccttttaagctggctgattccacgtcaacgcctttcatcacaaaaataaacatgacgccggcaacggataaaaccgtgaaccccttttgggtccacgttgggcgttcctttaaaacataagcggcaaagaccatcgtgaaaatcggaatggctgcctgaataattcccgcttcagaggaggacgagtacacaaggccaaatgcctgaaagctgaaaaataacgcgggatacagcagggcgagcggcaaaatggcaatgacgtcctttacgcggattgatagctttacccagccgaataagatcggtacagtggccgcagcaaacgcaatggtgaaccgatgcgccaaaatatcaaacggctctgctgtttgcagtgcgatttttacgaatagaaaggataaaccgataatgaacgaatataaaatagccgctatataagcgggggcttgctgatgtttaaccataatgggaatggctcctttacctgaattgcagcgccggtcgctccctttattgtatggccgcggtcagaacggtacaatgagaaaaacaatgaactgtaccggtacaaaacagggggagaaggcatggagaaatatatgagtctattaacgaagatagaggagatgatgcaaagcaccgcctatcaagaaggagacaggcttccatctatccgtcagctgtccgcccgctaccaagtcagcaaaagcacagtgatccgcgcgctgcaggagctggaaaaacgccaccttatctattccgttccgaaaagcggctattatattgtgaaaaagacgggaaaagccaaaagcgggcagcagggtcccattgactttgccacatctgcgccggatccagatgtgtttccgtatcttgattttcagcactgcatcaacaaagcgattgatacatacaaaaacgatttgtttatttatgggacgccaaaggggcttccatcactcatccgcgtactccgaaagctcttggccactcaacaggtatttgcggatgaacggcatattttcattacatcaggtgtccagcaggcgttatccttgctttgtgccatgccgttcccaaatgggaaagagaagatcgccattgaacagccgggctaccatttgatggtcgaacagcttgagacgcttgggattcccgccatcggggtgaaacgaacggaagaagggcttgatatagccgaggttgagcggttatttcaaacagaatcgattaaatttttttatacgatgccccgcttccataacccgcttggctgctctttgtcagagcgtgataaacaggagcttgtgagactggcagaagcgtatgatgtctacctcgttgaggatgattacctcggtgatctggaggaaaataaaaaggcagatccgctgtacgcatatgatctgtcctcacatgtcatctatttgaaaagcttctcgaaaatgatgttccccggccttcgcgtgggggcggctgttttgcccgaagcgctgactgacacgttctatgcgtacaaaaagctgaacgacatcgactgttcgatgatttctcaagcggcattggagatttacctgaaaagcggtatgtacggcaggcataaggagaaaatcagaaattcttataaagagcggtcgctgaggctacatcaagccattcaaacacacaggcagctgggaagcggacgctttacgttctccagcgggcaggcaccctgtatgcacacccatctggtgcttcctcaggatctgcccgcctcaagagtgattcatagactggaaaaacaaggggttctccttgtggcgatagaccgtcattatttatcagattatccgaaagaaaatctattaaaaatcaatatttccaatgtgaaaacggaagatattgagcgcggtgtcaagctgttgatgagccatttataaaagctcttcgtacgagaccattgtgatatcctcggggaaatcagggtgtgcggcgcatacagccattttgtagccgggatcgacctcatacgttttgatatagcatggggaatggctgtccggaagctcaatggatacttgtccgtcctggtgcaggcgcactgaaaaggaatcaagcggaagcgataagcctttgccttcctgtttgataaagctttctttcattgaccatagatgataaaaatagtctgtctgctcgtccttgtcttttgctaaaaggtcgctgtactctgtttttgaaaagaagcgcttggcgatctcaaggctgatcggtttcgttttttcgatatctatgccgatcggctgtgaatcaaacgcgcaaatgacccagcgtccggagtgagaaatgttgaaatgagcgtcgggaagatcagggatgcacggcttcccgtattcctgcgtgctaaagcggatatcggatttgtccaactgatactgcctgcttatgactgagcgaacgagcacatctcccagcagggtgcggtgagcatcttctttatgataaaatctccggcatttctcccgtttttcaggtgctatgaaagacatgaaccgttcattttcttcctgtgaaagcgggcggtccatataaattccgtaaatcttcattctagatcctccgtctgcaaaagattgtcaaaaccatcctatcatacttccacaagactcatatagaggagaaaataaaaaaacaaagccaaggcggctttgttttagtggacaggcggagatgctttcacagcggctgtccgccttgccacagcataattcagcagctggattgactgcggcaatgaaaaacgcagaatgagcccggtgaggatggcggtcaaaatggtgccaaaaccgatcggcccacccatgccccatgccgcaaacaaaatggttaattccatgccgttccgcacccattgcacattccagccggttttttctgtaatcagcatcatcagtgaatcacgcggccccgcgccaaggcctgctgatacataaacaccgacgccgtaaccgatcagcaccacgccgagagagaagacgatgatcgagcctgtgtaggtcgagggggcaggcagaatgaaattgaaaaaatctataaatacaccaatgagcaccatattcaggagggccccaattttcggccaagctctcgtaaacaatgacgtgaatccgacgatgagcgctccaataatgatggaccactggccgacggtaagcccgaagtgctgaaacaggctgtaatgaaatgcatcccacggactaatgccgagtgcttttccttctatcgtcagggatacaccaaaagccaaaatgatcaaaccggcaaaataaaatgtccagcgcagaacaagttcttgcttcacgtgaggtcccttctttcgtaaaaatcagtcgattgtcattgtagcacatctgacagaagggcggaataggcgaaaggggctcaacaaaaaaacagggccgccgcaggcgccctgtttcagcgtgttggtaaacccttgcattcgttgtcaggcctgtgcttcggtgctcacgaatttaacattcgctgtgctccaatgctcgcccttcctagacttcaaaggttttcaatcacgctgaaaatcacaaaatcctaaaacgaatatcgttttaggattttgtcaataatctgaaacagggcgcgggcgccctgtttttcttattacagcgggttcaaaatccggttcaagaaccgctgtgtccgttcttcttttggtgcggagaaaatttgctccggcggtccttgctccacgataacgccgccgtcgatgaagatgacttcatccgcaacctcctgcgcgaacttgatttcgtgggtcacgacgaccatggtccagccttcattggccaagtccttgataaccttcagcacctctccgacaagctcgggatcaagcgctgaggtcggttcgtcaaacagcatgagctcaggctgaatcgccagtgcgcgggcgatgccgacgcgctgctgctgtccgccggaaagctggaacggatataaatccattttgtccttcaatccgactttatcaagaagctgaatcgcttcttttctgacttcctctttgttccgtttttgcacctgaacagggccctccatcacgttttcgagggctgtgcggtgcgggaacaggtgatacgcctgaaacaccattccggattttcggcgaagctttaggatatccgcctgtttcacctttttggagaaatcgatggagaaatcatcaaatgcaagctctccgcgattcgggatctccagagcgttcaggcagcggagcagcgtcgttttccctgaacctgaaggcccaagtatggcgatgacttttcctttttcaatcttcatatctatcttttttaaaatttcattttcaccgaatgatttgtttaatcctttaacggtaagcatactcggaacctccttatttggccacgtagcggtcaagacgccgttcgatgacatgctggacgagtgagagcaggaagcagataatccaataaataaaggctgcttcaatatagatcactaaaatttgatcaagattccgcgcgccgatttcctgggcttttctgaacagctcagcgaccagaatttgagaggcgagggatgtatctttaatcaggctgataaaggtattggataatggcgggatcgacacacgaaacgcctgcggcaaaatgacgcggaacagcgttttttgatgtgtcatgccaattgtgtagccggcttcccattgccctttcggcacggataaaatagatgctcgaatgatttcagatgcataggcgccgacgtttaatgaaaaggcgataactgcgcttggaaatggatctaatgtgacgttaaaggccgggaacagatagaaaatgatgaacaattgaacgagaagaggagtgccgcgtattgcggatacgtatacgctgaacacccatctcaaaggtctcactttcgacattctggcaagcgccgtaatcagcgccaggatcattccgaatataaaggaaagaatcgtaaggggaatcgtatagtagattccccctgaaagtatcggccagaatgactgctgcaccagatcccacgggatcgccgtgccaagcgtcaatgccggcagattatttagaaacatcttcgccgaaccattttttagaaattttagaaagagtcccgtcctctttcatttcttttaatgctttgttgacttgatcaacaacctcgccgcttcctttacggaacgtgaaatatgttgactgaggctcacctgtttcaaacgcgattttcacgtttttattgccagatgtttttaagtagttcaatacggcaagcttatcgttgtatgtcatatcgacgcggccttgctggatcatttgaagggcctgcgccataccttcaacgccttctactttagcgccggcatttgtagctaatttgttgtagttgcttgtcagtgattgagctgacgtttttccttttacatctgcttcagacttaatatcgttgttgtcttttttcgttacgacaacggctcttgatgttgtgtatttatctgagaaatcatattgattttcacgatctgtttttccgacttggttggcaacaacgtcaaaccgtttggaattcaggccggcaaacatactgtcccactgtgtttccttaaagtcgactttaagcccgaggcgttttgcgacttctgtgataacttcgacatcatagccagtcagtttatcagtgtctttgtcgtggtaagtgaacggctcatatgttccttccgttccgactgtgagcacaccttttttcttaattgaagcccaaagatcgccatctttggcattatcttttgactgattgtcatttcctgctccgcaagctgcaagagctgcaatacttacgaccatgaataaagccaataatgcttttttcatcttattccccacttttctggttgattttattgaaataaaaaaatagcttacaaatctaaaggataacttttttttagtatgagtcaagtaattggttttcataaggcaaaatcttttaaaataaatccaaaaattgctgtgccggtttaggcaaataactgtccgttctccacatgacagccggtgtcataatgaagggattattttcgatatgaacggtgcgaacgtgatttctcatatgaacgggaatcattgtgacgggcaaaatagacgcgccgaatccggatgacacgaggctgagcaaagttgcagagtcgtggcattcacaaacaatgcgcggctccaggttcaaacgatgaaattcattcatgacctgattataaacgccttttccgttgacaggccgcagcaggatcagcggaaatgaaggaatgtcctccatcttaatggtgtctccgcacggatatccggcttcatctgaaagcacgagcacacatggaatgtcatcaagctgtttgaattgtactgtgtcacttttgatcagtgttgtcgtgaccgccgcatcgatttgccggctttccagcagctccaacagtgtcgcgggttcattttcccaaatattaaaggtgagatgggggtatctctctttgatctgtgttactttttcaagcatcagagccgcgcaataaatcgttgatcccacggcaagtgtgccggctacttcctccttcagctcctgtacctcaatgactgcatcttcaaacctatgcagaatctcttttgctctttttagaaaaacagctccttcatatgtaagagtcatttgttttttcttgttacggtcaaacagaacaacaccaagttcgtcctccagctgtttgagctgcctgcttaaaggcggctgcgccatgtgaagctttttggctgcggacgtaattttctgttcttgggcaatggtaatgaagtatcgaagctggcgaatatccaaaagaaagcgcctccttatcataccttttaggtattaaatatagatttaatagatatttttcatatggatatatcaggagtatgattgaaatgaaagcagaattcaagcgtaaaggagggggcaaagtgaaactcgttgtcggaatgacaggggcaacaggggccattttcggggtcaggctgctacagtggctgaaggccgccggagtggaaacccatctcgttgtgtctccttgggcaaacgtcacgatcaaacacgaaacaggctataccttacaagaagtagaacaactggccacatacacttactcacataaggatcaggcggcagccatttcaagcgggtcgtttgataccgatggaatgattgttgcgccgtgcagcatgaagtctctcgcaagcattcgcaccggaatggcggataatctgctgacacgtgcggcggatgtcatgctcaaggagagaaaaaaactcgtcctcttaacgagagagacgcctttgaaccaaattcatctcgaaaatatgctagcgcttacgaaaatgggcaccatcattcttcctccgatgccggcattttataatcagccgagaagcttagaggaaatggttgaccatattgtttttagaacgttggaccaattcggcattcggcttcctgaagcgaagcgctggaatgggattgaaaaacaaaaaggaggagcttgatcatggcttatcaagatttcagagaatttctcgctgcccttgaaaaagaaggacagctgcttacagtgaatgaagaggtaaagccggaaccggatttaggggccgccgcacgggcagccagcaatcttggcgataaaagccctgcgctcttatttaacaacatttacggctatcataacgcgcgaattgcgatgaatgtcatcggctcttggccaaaccatgccatgatgctgggcatgccgaaagacacaccggtaaaagaacagttttttgaattcgcaaagcgttatgaccagtttccgatgccggtcaaacgtgaggaaacagcgccatttcatgaaaatgaaatcacagaagatatcaatttgttcgatatactgcctcttttcagaattaaccagggtgatggaggctactatttagacaaagcatgtgtcatttcccgtgatcttgaggaccctgacaacttcggcaaacaaaatgtcggcatttacagaatgcaggtcaaaggaaaagaccgtctcggcattcagcctgtcccgcagcacgatattgcaatccatctgcgccaagctgaagaacgcggcatcaatcttccggtcaccattgcgctcggctgtgagccggtcattacaacggcggcatcgactccgcttctctatgatcaatcagaatacgaaatggcaggcgcgattcaaggcgaaccatatcgcatcgtcaaatcaaagctgtctgatcttgatgttccgtggggcgctgaagtggtgcttgaaggtgagattattgccggagagcgcgaatatgaagggccgttcggtgaattcacaggccattattccggcggacgcagcatgccgattatcaaaattaaacgcgtctatcacagaaacaatccgatctttgaacatttatacttaggcatgccttggacagaatgcgattacatgatcggcattaacacatgcgtgccgctttatcagcagttaaaagaagcgtacccgaacgaaattgtggcagtgaacgccatgtacacacacggtttaatcgcgattgtttccacaaaaacccgctatggcgggtttgcgaaagcggtcggcatgcgcgcactcacaacgccgcacggactcggctactgcaaaatggtcattgtcgttgatgaggatgtcgatccattcaaccttccgcaggtcatgtgggcgctttcgaccaaaatgcatccgaaacacgatgcggtcatcattccggacttatctgtcctgccgcttgatccgggatccaatccatcaggaatcactcacaaaatgattcttgacgccactacaccggttgcgccggaaacaagaggccattattcacagccgcttgattcgccgctaacaacgaaagaatgggaacaaaaactaatggacttaatgaataaataaggaaaggatgttcgaaatgcatacatgtcctcgatgcgactcaaaaaagggagaagtcatgagcaaatcgcctgtagaaggcgcatgggaagtttatcagtgccaaacatgcttttttacatggagatcctgtgaaccggaaagcattacaaatcccgaaaaatacaatccagcgtttaaaattgatccaaaggaaacagaaacagcaattgaagttccggcggtgccggaacgaaaggcttgatccgcgtgaactgtatgtcagaccgcctctttgagctgcttgacgggagctgcctgaatgagaagcagcatgaggccttcgttctgcaaacagtatcagaggatggctggccgcatgccgctatgatcagtgcaggtgaaattatcgcgctgagccgaattgatatccgaatcgctctgtggaaaaacacaatgacttcggccaacatccttcgcacaggaaaagcacagttcacggcgtggtggaagggagcggcctattatgtaaagcttgaatgcgcgcctttaccgcctttgaatgatgctgaatatgatagagaccgtttttcctgccgcatcgtttcagtgaaggaggacgttgcgaaatacgctgatttgacttcaggtgtccgtatacagcttcacagccctgaagaggtgctgagcagatgggaaaagaccctggaagatttaaagcggtaatatcgatagcctgacgccatgcgtcaggctttttttatataatgaaaacaaaagggggcgtgagaaatggaacgtgcggggatcagtcactcggacggctttgatttagcttatcgaattgagggcgagggcgcacccatccttgtgatcgggagtgcggtttactatccgcgccttttttcctcagatatcaaacagaaatatcaatgggtctttgtcgaccataggggatttgctaagcctaagcgggagcttcgtgcggaggattcgaggcttgatgccgtcttggctgatatcgaaaggatgagaacatttcttcagcttgaggatgttactatcctgggacattccgggcacgcttttatggctttagagtatgccaggacatatcccaaacaagttcggaaggtggcgctctttaatactgcgcctgataacagtgaagaaagacagcgaaaaagcgaatcatttttcatggaaacagccagccttgagagaaagaaacgatttgaaaaagacatcgcgaatttgccgcaggacatcgacaaagatcctgaaaggcgcttcgtgcacatgtgtattcgcgctgaagcgaaaagcttttatcaagagcggccgcatgctgctgccttatgggacggtgtattcacgaatatgccgatcattgatgaattatggggcaatacatttgcccggattgatcttattcagcggttagctgatgttcgtatgccggtgtatattggattagggagatatgattatttggttgcgcccgttgcgctatgggatgcagttgacggtttatatccccatgtggataaggttatttttgaaaggagcggccatcagccgatgctggaagaaccggaagcctttgatcaaagcttcagcaaatggctggatcaataaaaaaacagcccgcagatcaaaatccgcgggctgtttctgattataagacccctttcatcgcgcgtttgataaccggcgagagcagcaggagaatgccgccaagaacgatagaaatcaaaccgatggtgccgaagtacattgtttcaggaattttatcaaacaatccggctacttgggcattgatcgcttgtgctgctgcgttcgtcagaaaccacatactcattgtctgtgcagagaaggcagctggtgccagtttcgttgtcacggataaaccgactggagacaggcacagctctccaagcacgacaagcaggaagctgagaacgagccaaagcgggcttacgagtgcttcttttccttgcatagcagggaataccataatgataaatgacaatccggctaaaataattccgattgagaatttaactggtgtagacggctggcgtttgccaagcttcatccagagccatgcgaatattggcgcaaaaatgacgacaaacaatggatttaatgattggaaccatgatgactgaagttcgaatccgcccaatgaaagtcttatgcgttcatcagcgtataccgcaagaatggtcgctccctgttcctgaatggcccagaacatgacagcaccgataaacaaaggaacgtaagcggcaagacgggatttttctgttttgtccgcttttttgcttgtaaacatgatgatgaaataaatcacaggaatcaaaataccgagaatacttacaaggtcgataaaacgattgatcgtcagcacgcctgtttgtacagagataatcactgcgatcgccacgatgataacaccgattccggtgccaatcgcagattttttagacagcggattcggcacattggaacctgcaagcccgaggtttttctttcttgtcaaagcaaaaacgataagtccgagaagcattccgaccgcggcagctccgaagccgagatgatagttgtacttctgtccgagtgttccgacaattaacggcgcaagtaaaccaccgaggttaatccccatgtagaaaatactgaaacctgagtcgcggcgcgggtcttctttcgtgtaaagatccccaaccacgcttgaaacgtttggttttaataagcctgttccgacaatgataagcaccatgctgatatagaatgcgatcgcgctgcccggataggcgagtgcaatgtggccgaacataatgaatatgccgccgtaaaacacggtgtttgcggtaccgaatacccggtcagcgagccatccgccaataatggtggacatgtatacgagtgatccgtaaatcgacataatggcaaccgcagtgcccttgtcaaagccgagccctccgtttaccgtctctgtatacaaatagtaaagtaagattgctctcattccatagtaagagaaacgctcccaaaattcggtgaaaaatagtgtaaatagtcctcgcgggtgaccaaagaaccctttttgcgggacgcttttaatgatactttcgttatcaatcgaagccatgtcagccaaaccctttctaaaaaaagtgtattataaaaatcatattcttatataatacttgtgtcaatataatttatactcatttcaaatagttccatattggaaaaattataaatacctaaaaatagtgatttcctcctaatttttaaactttttatcgtgagattttcttacacaactattcctttatatttttttaataaaattttagagaaatgtacaagcagatcgggcctttgtgagtaacatgatagtaatcatagagaaggaggctcgcaattggctgaattcatattaaatgcagcggatttcggtgttcctggagatggtaaaacggattcgacagaacggattaatcagtgcctcagtacagctgtatcgaaaggctatcatactgtctggtttccaaagggaacatatttaatagacgcaacgcttggcggagatcttaatcagaggtttcgaaacgcggggatcattgttcccggcaaccttgagattatgatggaccccgaatgtatcatgaaagtgatcccgaatagttcgtggggttattccgcattttatgtgggcaagcaagagaatataaccatttccgggggacaaattatcggcgaacgggatgagcatacgtatgcctcggcagggataaggtcaacccatgaatggggctttggcatatgtattgaaggatgctcgaatgttgtcattgatgatgtgaaaatttctgattttaccggcgatgggatcatagtcagcccaaggggattaaagaccaatcaagattatcgaacgtcagagcaaattatcatccgccgctgtgaggttcggcggtcgaggagaaataacatttccattaccggatgtgacatggtcacggtggaggaatgcttgattgaagatgccggaacggggaatggaacagcgccgaaattcggaattgacattgaaggatatggcgaaggtgatgttgattatgaggaaccgattaatgtatcaattcgcaataaccactttgttggaaacgtttcaagttctgtgaccaattttaacgggtatggcattttaatagaaggaaatcactctgacaatacaatcagctacggatatgggacgcaaacagtgatcaagggcaatattctgagacgccctgaagacgcggcggctgcgccaagagtcgggataaccggactcggtgtatcacaaggaaaagagaccagtgatgcagtgatcgctggcaacctcattaccggattttcaactggaattgatgtcagaggaaagagcgttcttgtgacgaacaacaaaatcagcaactttgaaaacacagggatattggtttatcagtcttccgatgtaaaggtagacggaaaccaaattcaaaacggactgtctgaaacaaggcgcagcatcggtcttcgcgcagtgctgtcagatgacatcgcttttctgaataactgtctcattcaagtcgttgacggtgtgaacgtttccggcggaaatatgatcattaaagataatctcctgagaaaattcagccggggcatttggattgctcaagggaacgcggtgattgaagggaatacactgaatcctgacgcgtttgaagcagtgccggaatcatattctgtttccgtcacaaacaatgccggcgccatcatcaaaaacaatacatttaaagagttcaaaaattaccccatttattgctccacaagtgcaaaaacctcaattatcggcaaccacttagagcgatccccgcttttggtcaccatctatatcagcgcaggtgtgcatgagatttttgataataccatttcagtcaacagaacagccgggaatccgattgtgatttatctcaatggctctgcaggctctatcatctctggaaacaccatcaataacctctccgcgggcactgcgacagctattcaaacaaacacgtcaaccaattccaaaatcatcggcaaccgcatttttaaagggaccatcaacaaacacagcagtgatacaatagacggcaatatgattgtctgaaaaaagcgcccccctttaggggttcttttttttcgatttatagatcacgtacatttctctcacaagtactaacacaaaaaataaaagcacgacccattccgcaaatgttgtcatcttaaagctggacatattgttataaacggcttttgttaaactgaacccttgaagcatgtccatcaacacagaaatagctaataaacaaattaatatgactccggtcacgcccaatatcttcatgcttcatcatcctccgcttttagtgtctatctttggcggagaagttataccgcatctaaccctaatgcataatctcaattttaaaaggaagaatatgagaaaacgacaaggaaaggtatttgtgtatgcctttattttctaagcgaaagaacaataccgattcaaaagacaagcagaatacagacgaaaggaatcaggaacagcagcaagaaaaagaaaggccggttctcatttctccaagtttggcaaagaatatagcggaaacgaaaaaggaagtcggaagcagctctgacgtcatcattcgcgagattaaaatcggggagcaggatcatgtccacctagctgttatctatattgctgggctggtcgataataacacgatccatgagtcgttaattgacccattggtacaggatgagtctatccagaatactcatgcgatccagcaaattcttgaaaaaacgctcccgctgggcggggtgaaagcggaaaagagctgggacaagcttttttccgagttaatgctcggcaatgcgctcatttttgctgatggccatgatgaagctttgatttgcagcactcaagggggagagcagcgctccatccaagagccgagcacccaggtgtcattccgcggcccgcgccaagggtttacagagtctctgcaaaccaatatttccatgatccggcgatacattaaaaatccgaatttatgggttgaaaaaatgaaaaaaggttctgttacgaatacggatatcgctctcatgtacattcaaggaatatgcgatgaaaaggtgctgaaagaagtgaagcagcgcctggaaaaaatagatattgacagtattttggaatctggatatattgagcagctgattgaagatgaaacctttacgacgtttccgactatgtatcatacagaacgccctgatgttgtagcgggtaatctgttagaaggaagattcgcgattattgtggacggaacaccgtttgtgcttattgccccggccttatttgtccagttttttcagtctgttgaggattattattcgcgttttgacattgcgacaagcataagaattcttcgtgttttagtctttttcatttcgcttgtggctccggctgtatacgtggcagccacgacgtttcatcaagaaatgataccgactcagctgttagtggtcattgcggcccagcgggaaattgtcccgtttccggctgttgtggaggcgctgacgatggaggttgcttttgagattctgagggaagcgggagtcaggctgccccgggttgtcggctcggcagtgtcaatcgttggcgcgctcgtaatcggccaggctgccgtacaggctggtatcgtctctccggcaatggtgattatcgtggcactcaccgcgattgcgagcttcgcaacaccggcgtttgcaatggcgatttcagcccggcttattcggtttatctttattattgcctcagctgttatgggtttttacgggctgattttagggatcattatgatgtttgtccacttatgcagtcttcgttcattcggcgttccatatatgtcgccgcttgcacccttttcttcacaaggcgtaaaggacgcgcttttccgggttccgtggtgggccgatgaaaaaaggccggaatcggtcagcaaggaagataaggtgcggcaggggcaagatcaacgcccagagccggccgcttcacgaggaatggtgaacaaagatttggaagaaggggatcagaatggtacgtaaatgtctattagccgttctcatgcttttgagcgtcattgtgctgcccggctgctgggataagcgggagctgacggatcttgcgattatctcggcgattggcatcgatcggacaaacgacagcaactacgtgctgcatcttcaaattatcaatccaggaaatgttgccggcggccttcagggaggcggtgctggagacaggccgcctgtatctgtctattcaattgaaggcgacaatttgacggaagcactcagaaaagcctccatgaaggtatcgcggcggctttattttgcccataccaacctggtcgtaatcagcgaaaagctggcgaaagaggaagggctggattttgtattagacaatcttgaccgggacacggaattcaggacaacggcgaccttcgtcgttgcccataaaacaaaagcagaaaatatcgtgaaaatcctgacgcctattgataaaattccgtcaaacaaagtcaataaaaccctcgatttcacggaggcgcaatacggtcgggtggtcaaaaccaatattcaggacgttttgaaaacacttgccagcgacacaagggcaccgattattccgggttatttgatgattggcgatgataaaaaaggagtcagcatggaaaacacgcaggcaactgacccgaaagccattcttcaggcagacggattggcgatttttgacaaggctgggtatttaaagtattggattgaagatgatgaaagcgtgggggcagtctggcttatgaataaggtccagcatacgtttattaatgctgattggggcaagacgaaggatgcggtcagcttgcaggttacccatcaagatacaaagctggtacctgatatgcggaacggacgtccgcacatccatgtgaaagtgacggttgaaggaattatagatgctgtcaaataccctttccaattgtctaatccgaaggtgctggccgctattgaaaaagcgctcaacaaagagcttgaaaaggaaatcagccatactgtgaaaaagatcaagaagaataagatagattttgtcggttttggtgacacgatatatagaaagtatccggagcagtgggagaaaatgaaggacacttgggacaaagaatatttgccggaactgcccatcgatgtgaaggccgagacgtatatcagaaggacgggattgcgaaacaatccgatcaaacaccagtttaaagatgattaggtctgaagaaaggggaagtgacagatggaaaaagccagaataagcataaggcagctgtttgtcatgattatcatttttgaactgggcagctccttattgattacaccgggatcaatggcgggcagggatgcttggatcgcagttctgttggggtgtgcggccggtttgtttcttttctatttgtatcaaggaatttatcaatgttaccccaattcttctccgaaagaatatatggatgatatgctgggaaccaagctgagctggctgttttcatttctctatatcttgtactttgcctatattgccgcaagggtcctgcgtgactttggagaaatgctgctgacatttgcttatcatgatacacctatcattattgtaaatggtttattagtgatagtaagcatatacgctgtaagaaaaggaatcgaagtgctcgcccgcgcggctgagctacttttcggagccatgtatttactgggcgcgatcggcctcgtgctgattgttgtctcaggttctatagacccgcataacttaaaaccggttttggcaaacggtatctctcctgtcctttactcagttttcactcagaccatgtacgttccgtttggcgaagtcgttttatttgtgatgattttccctaacctgaatgacagaaaagatgtgaaaaaaatggggatgattgccatagctattagcggattggttgtggcgctcaccgtggcgattaatatcagcgtgcttgatgttgatcttacactcagatcccagttcccgcttttaagtacgattcagacaatcaaggtcgaagaatttttagaccggctcgatgtcttttttatgctggcgctgatcatcggcggcttctttaaggttagcctctacttatatgccactgtggttgggacatctacgctctttaaggaaaagaacccctctcaattggcttatccgatgggattgggcatcttaatcctttctataacgatcgcgactaacttttcagagcacttgaacgaaggcttgaaagtggtgccgctgtatattcatttgccttttcaattattgtttccgctctttctgtttattgtggctgtttggaaaaagaaacgaagagagaagtcaaaagggacaggagcaaaaaaatgataaaaagagcggggggatgcagccgccgctctttttatgttcacttctatataaaagggggatatagggtgcgcccctgtctgcactggcagaggcgcgttttgttatacgactgcgacgttttccttcacagtaaagcttcctcttgaaagtctgatattgatgtctgacacttttgcaatttgttcatcgtgcgtcaccataatgacgcatttatcttccttgtgcgccagatcctgaaagagccgtacgatctcttttgatgtgtcctcatcaaggtttccggtcggttcatcggctacgataagatccgtgtcacagcagaaagcccttgtaattgatacccgctgctgttgtccgccgctcagtgtgagtactttttgccgggcttgtttttcgttgatgccaaccttctgcagcatgtcaagcgcatatgattcgttgttcttttctttagaacctgtgatttccatagcggttgtgacgttctgcaaagccgtcatatacgggagcaggttgtacgcctgaaagacgattgatacatattgatttctgaaattggttaagccgattttagaaaccgcttttccgccgtaaaggatgtttccttcttttggtgcgtcaagtccgcctgccagagacaggaaagtggttttccccgtccctgatgtgccgacgattgtgtagaatttgcctttttgaaagccgatgttaatatcctgaaacaatggctggcttttgtctttataccagtagccgacttgttgaaattctaataagctcataggttccgcctctttctattcctgttttgtcaatatcgttttcggatgaagccgcagtactgaaattgacggcagcaatgttgcaatgattgcgattaggatgccgatcccgccaagaataagcatgtcgttcatagaaaccgcgacgttcagtgaatcgataacgtccacgtttgatgaactgtggccgaacattttgccgcccatgccgccgccgggcatttgtccgcttgcggtttgcgttgaatcggttgatgaactgatttgctgggataaaagctgatttccaagctgatttgcgacgagatttcccgtcacagatgcaaggccgatagcgataacggccacaatcagaatctcagtcaagaactgtccaatcaatttccatcgtttttcaccgatggccattaacacgcccatttcgtatttgcgctccctgattgacatcatgacaatcaggccaagaatgacggcgcctgccactgatacaagatacaccacgtttttagagaaagaagccacattttcaatcggtccgaccatttgctggtaaagctgatcgtttgtattcagtgtgtacgtatcgaagtcaattgatgttttcttcgctgcttttacgaaagcatccatatttttcgcgtcgtccatatagtaaacagctgagtcaatcgtatttttatagtcgtcgcctttcagcgccgctgttgctgtgtaaggcgtataaagcttgttataaggatttaagaaagagaaattttgggcttggtcatcaccagaagatgttgttttataaataccgacaatcttcagctttaccgtcgtatcttcatctgttgctgattcaattgtgatcgaatcgccaacgctcaaatcattttcttccgctaatgtttcgttgatcactgttacttttttgccgacatctgattttgtaatcgcgcgtccgtcagtgatttttgaatccccgtcagagaaatcatcaactaatgctgtgctgatgacaccttcaatcgaaagatcagcttgaaccatttgcggtccgccttgtcctccgccttgactgtttttagcgtttgagcttgaactgctggagctggaatcacttgaactagagctttcaatcgcatcaaagtttcccgcgttggctgaagctgatgtggtgtaattgtagctcttcacatgatcaagcgctgcaagcttattcgcatcagacactttgatcggtgtggattcgaagctgcgcttttcaccgctgtcctgctgtttttccatttgcttttggcggtcaacctgaagtgtcacgcttccgccgagttcctgtctggccagttcgcttgatttttgtgctgccgactggatggtaaggcctgatagaacaaagacacatatgactgtaaacacaaataattgcaataacgtttttccctttttagccttcatattccaaaaggcccgtttgataaagttcatttatgttcctccgtataggtttttttatggataagaccgcctctggggcgcgcccgctgataaattaatagtagtccaaaggtatgaaaaaaatatgaacaatctatttctagttgatgaaataaaaactaacaattgtgaaacgcaaaaccttctgtttaaaatggtgctattatataaaaaagcatcaaaacaaccggaggatataatgaaaatattaatgatagaagataatgttagtgtatgtacgatgacggagatgttcttttttaaagaaggttttgaagcggaattcgttcatgacgggttagaagggtaccagcgttttacggaagaaaattgggatctgatcattttggatatcatgcttccatctatggacggcgtgaccatctgcagaaaaataagagagacaagcacggtgccgattatcatgctgactgccaaagacactgaatcagatcaggtcatcggttttgagatgggggcggacgattatgtcacaaagccgttcagcccgctgacattggttgcccgcatcaaagccgtcatcagaagatataaggcgacaggcaaagcggttattgatgaagatatgattgaaacggaatgctttaccattaataagaagacgagagaagtattattaaacggagagcctgtagaaaatctcacgccgaaggaattcgatctgctttattaccttgtccaaaatccgcggcaggtgttctccagagaacagctgcttgagcaggtatggggctatcaattttatggagatgagcgaacggttgacgttcatatcaaacggctgcggaaaaagcttgccagcgaggacaagcctttcctgtatactgtgtggggagtagggtataaatttgatgaagattaaatatttatatcagctgctgctaagccatatcagcattttgattttagcgtttgtcattatcatttctctgttttcccactttgtgaaggaatttgcctatcagaacaaagtagaggaattgacgtcatatgcggtgcagattgcaaatgaattccaagccggccaggtggacatgcgcaggctctatccttatcaggacatgttaagcacaagaaagacgcagtttatcatctttaatgaagagcagcagccctattttcttcctgaaggctttcatcacccaccaagggaacagctgaagaagtcagaatggaataagctaaaaaaagggcagactgtcatgatcagggcagatggccgttttgatgatgaagtgtcacttgtggcgcagcctatatttgttcagaacgaatttaaaggcgccgttctgctgatttctccgatcagcggtgttgaacagatggtcaatcaggtcaacctctatatgttttatgctgtgatcagcacgcttgtgattacgattctcgtgagttggcttctgtccaaattccatgtcaagcggattcaaaagctgagagaagcgacagataaagtggcttccggcgattatgacatccatttggaaaacagctacggggacgaaatcggcgttctggcgtctgactttaatatcatggcgaaaaaactaaagcagtcaagggatgaaatcgatcgccttgagaagcggagaaggcagtttatcgctgacgtgtcacatgaattaaaaacaccgctgacgacgatcaacggtttggttgaagggttgaacagccatacgattcctgaggataagaaggataaatgcttctcgctgatcagtgaggaaacgaagcgcatgctgcggctcgtaaaagaaaatctggattatgaaaaaatcagatcccagcaaattacattgaacaagctagacgttcctctgatcgaggtgtttgaaatcgtgaaagagcacttgcagcagcaggcggaagaaaaacaaaacaagctgatgatccaagtagaggatcacgtcatcgtacatgccgattatgaccggttcattcaaattctcgtcaacattacgaaaaacagcatccaatttacgaaaaacggtgacatttggctgcgcggaatggaaggttataaagagacgattattgaaattgaagacacgggtatcggcattccaaaagaggatattgagcatatttgggagcgattctataaagcagatatttcaagaacgaacacggcatacggtgaatacggactcggtctctcgatcgtcaggcagctcgttgaaatgcaccagggcacagtagaaatccagagtgaagaagggaaaggcacaaagttcataatccgccttcctttaacggcaaaacagcaatagcatacagggcggcgcatcaattgatgcagccgccttttttgcacaccgcttcggtttattgcgtgctcccgaaaacaaagattgcgtgtttttcgggttgggacggtctataaacatgataaaatatgacataaacagtttttgatgggagagggtgaaggaatgaagagcggggtaattccttcttcagcggtcggtcaaaaaattaacgagtggtacagatatatccggacattcagcgtgccggatgccgaagtgttaaaagctgaaatccagcaggaactgaaacacatgcagcatgattccaacttgctgctttattattcactaatggaattccggcaccagcttatgctggattatcttgagccgttagagaaattaaatatcgaagaccagccaagcctgtctgaattatcaagaaacattgacagcaatcaggcagatctcaaagggctgctcgactattacgtgaatttttttcgcgggatgtatgagtttgataagcgggaatttatttctgccattacatactataaacaggcggagaaaaagctctcctttgtcgcagaccatattgaacgggctgaattctattttaaaatcgcggaagcttattattatatgaagcaaacgtatttttcattgattaatataaaaaacgcctatgaaatttacgtggagcaggaaacctataatgtgagaatcattcagtgccatttcgtgttcggggtcaacctgatggatgaaagaaatttcgaacaagccgcacgccatttcaaattggcgctcaatatggcccaagcggaacaaaaagcccagctggtcggaagagcatactacaatctcggattatgctattacaatcaagaccttctaggccctgccattgattactttgaaaaagcggtctccacgtttgaaagcagcaggatcgtcaattctctcccgcaagcctattttttaatcaccctgatttattataaacagggaaaacatgataaagcttcggaatatcacaagcggggctatgaatatgctaaagaaacagacgatgcagactatgccgtaaaattcgagtttttgcaatccctatatcaggatcagcccaatgaagaaggaatcgaacgatgtttccaatacttaaaaaataaaaatatgtacgctgatatagaggatttagccctagaagtagcaaaatattactatgaacagaaatggtttaaactgtctgcttcctactttctacaagttgaagaggcaagaaaacaaatacaaaggagtgaaggtttgtatgaaattgaaatctaagttgtttgttatttgtttggccgcagccgcgatttttacagcggctggcgtttctgctaatgcggaagcactcgactttcatgtgacagaaagaggaatgacgtaagaacaagccccttctcattagcgagaaggggtttttcttttcaaaaaaacaccgcaagacatagtcttgcggtgccgccttcatggagattacgtttatttagtagcctcctacaaatgcagttcccacaatgatcaagaggataaataacacaacaatcaaagcgaaagaagttccgtaacctgacattttgtgcacctccttgcgagattgcttcagcaaatgctgcaaaactgtggcggacagggtcccgcagagacggtcagcagcttagaagccgccaacaaacgcagtccctacgataattaatagaataaacaatacaacgattaaagcgaaagaactgatgccgccgtaaccgccgccgttagagtatcctgacataaggtttcacctccctatgaaggatactataagatatgctgaaccgatccatttggcagggataatagtggacaagagaaaaaatgaagaattcggctatatgaaggtgatataaaaaaatagcgggcgctgccgcccgctatttatgtacgattaagagatcagcacgcccgcgaaaaattcctggtataacgcttgaacggcttttctttcttcggcttcttttacgccaaacatcatgctcacttcagaagacccctgattgatcatttcgatattcacctgtgcctctgataatgctttggcggctcttgccgttgtaccgacattgtggcgcatcgcttcccctacaaccataatcagggcgagatgatgctcgacgatgacttcatcggcatgcaaatcctcttcgatccgtttgatgacgctgcgttcagtggcggcatccatttgcccctgccgtaaaatgattgtcatgtcatcgattcccgatggaacatgctcatacgtcaaaccatgctcctccaggatttgaagggctctgcggccaaaaccgatttctctgttcatgagatacttgctgatataaatgctgcaaaaaccggtgtcgctggcaatgccgacgacaggcccgtttgtgttatcccgcttgctgacgacgcgggtgccttcggctgaggggttgttcgtatttttgatctgaacaggaatccccgctctgaatgccggaatgagcgcttcatcatgaaacactgaaaagcccgcgtaggacagctcccgcatctctctatatgtcagctcgctgatttcctttggattctcaacgaaggacggattgacagaatacacagcgtctacgtctgtaaagttttcgtacaaatcggcttgtagtccgttggcaagaatcgaaccggtaatatcagaaccgctccgtgagaatgtgatcacatcgccatccttgctgaatccgaaaaaaccgggaaaaatgatgagtccgtcacgttcccgaagacgatagaggttttgataggattcaggaagaacttgcgcgttgccgggttcatttgtcacaaagaggccggcatccttcgggtttacatatttcgctttgacgcctttataacggaagtaagcggcgatcagtttggcattgttatcctctccgctggccttgactgcgtcaaggtattgttcgggattgcttttgtctccttctaaaagcgtaaacagatcatctctgattttttcgataatgctttgccccagctgaagctcattggcgatgagagcgtaccgttccacaacagcttccgccagttcaggtgcgctgcctgttgccaaatattgttctgcacatgcgattaagagatcagtcactttcgtatcctcggcatagcgttttcccggagctgaaacgactacagctttccgtgccggatctgaggtaacgatgtgaaacaccttgtcaagctgggcgcctgaagcaagtgagctgcctccgaatttaacgaccttcatgtttacatctcctaatgtttaaaattttcacacaaatttagtatttattatctctctttcagtactgtaaatcaaggggggatttctttctcaggagaacatttgtatttttcacgaggaataatgttaggtttgctgaccgtatgcctgcgttataaagataaatatggtaaacagcctaacgttttgggatggaaaatggttagaatgattagtaaaattgataaatgactaggttaatatttttaaagaatattgactaaccctataaaaatggtaatatgtaaatgataatgataatcaattactatatggccatattgttttgagtccttgcggagtaggagatacgttctttttgctgtaaggatgtaaggaggcagcatgaagctacgttacttatttattctacttatcatattagcagtcacatctgtatttatcggtgtagaagatctgtcgccgcttgatctcttcgatttaagcaaacaagaggcgtcaacgctgtttgcaagccgtttgccgcgattgatcagcattgtcattgcgggattaagcatgagcatctgcggtttgattatgcagcagatcagcagaaataaattcgtgtcaccgacgacggcgggcacgatggattgggcgaggctcggcattttaatttccttgctgctgtttacatccgccagtcctttaatcaaaatgctggtcgcgtttgtctttgcccttgcaggaaattttctgtttatgaaaatccttgaaagaatcaagtttaacgacaccatctttattccgcttgtcggtttaatgctcgggaatatcgtcagttcaatcgcgacatttatcgcatataaatatgacttgatccagaatgtgtcatcatggctgcagggagacttctctttagtcgtgaaaggaagatacgagcttctttatctgagtattccgctcgtcatcattgcctatgtgtatgcggataaattcacattggccggtatgggtgaaagcttttctgtcaacctcggcctcaagtataaacgggttgtgaacatcgggctcattatcgtgtccctgatcacgtctcttgtcattttgactgtcggtatgctgccgtttctcggtttaatcatcccgaatattgtatcgatttacagaggagacaatctgaagagcagcctgccgcatactgcgctgttgggagcagtttttgtgctgttttgcgatatactgggcagaatcattatcttcccttatgaaatctcgattggcctgatggtcggaatcatcggcagcggcattttcctgtttatgctgttaaggagaaaagcctatgcgtaaccagatgaaaatagctttgctcgttggtttagccattgtatgtattggcttgtttttgttttatgacttaggcaattgggattacaccctgccgagacgaatcaaaaaagtcgctgccattgtgctgactgggggagcgattgcgttttcgaccatgatctttcaaacgattacgaacaaccgcatcctgacgccgagcattttgggccttgattctctctacatgctgattcagactggcattatctttttgttcggttctgcgaatatggtcatcatgaataaaaacatcaactttatcatctctgttctgctgatgatactgttttctcttgttttgtatcagatcatgttcaagggtgaggggagaaatatctttttccttctgcttatcggaatcgtgtttggcacgctgttcagcagcctgtcttcttttatgcagatgctgattgatccgaacgagttccaagttgtgcaggacaagatgtttgccagctttaacaatatcaatacggatttgttatggctcgcgttcatcatcttcctgctgacaggcgtttatgtctggcgttttacaaaatttttcgatgtgctgtcgctcggacgcgagcacgccgtgaatttgggcattgactacgacaaagtggtgaagcagatgctgatcgtggttgcgattttggtttctgtttcaacagcgctagtcgggccgattatgtttttaggccttctggtcgtcaacctggcgagagaattcctgaaaacatataagcattcatacttaatcgcaggctccgttttcatcagcatcattgcgctggtcggagggcagtttgtggttgagaaagtgtttaccttctcaacgacgctgagcgtcattattaattttgccggcgggatttattttatctacttgctgttaaaggagaataaatcatggtagaggtcagaaatgtaagcaaacaatatggcgggaaagttgttcttgaagagacgtcagtcacgattcaaaagggcaaaatcacctcgtttatcggtcctaacggcgccggcaaaagtacgctgctgtctatcatgagccgcctgatcaaaaaggattccggcgagatttacatagacggacaagagattggagcatgtgacagcaaagagcttgccaagaaaatgagcattttgaagcaggcgaaccaaatcaatatcaggctcacgatcaaagacctcgtcagttttggcaggtttccgtactcacagggccggctgacagaggaagactgggttcatatcaaccaggcgcttagctatatgaagctggaagacattcaagacaaatacttggatcagctgagcggcggacagtgccaaagggcatttatcgccatggtcattgcccaggacacagattatatctttctggatgaaccgctgaacaatctggatatgaaacactcagttgaaattatgaaactgctgaaacggctggtagaggagcttggaaaaacgatcgtgatcgtcattcacgatatcaattttgcttcagtctattctgactatatcgtcgctttgaaaaacggccgaatcgttaaagaaggaccgcctgaagaaatgatagaaacatcagtgcttgaggaaatctacgatatgaccatcccgattcagacgattgataatcaaagaataggtgtttatttttcttaatatatagaagaggtgaggagcatgaaaaagttcgcgttactattcatcgctttggtcactgccgttgtcatttctgcatgcggaaaccaaagcacaagcagcaaaggttctgatacaaagaaagaacaaatcacagtgaaacaccagctcgacaaaaacggcacaaaagtaccgaagaaccctaaaaaagttgtcgtatttgactttggaagcttagatacattagataaactaggacttgatgatatagtagcgggcctgccgaaacaagtccttcctaaatatctgtccaaattcaaggatgacaaatacgctgatgtcggcagcttaaaagagccagacttcgacaaagtggcagaattagatcctgatctgatcattatttcagcaagacaatctgagtcttacaaagaattctctaaaattgcgccgacgatttaccttggtgtagatacagcgaagtacatggaatcatttaaatcagacgctgaaacaatcggtaaaatctttgataaagaagacaaagtgaaagatgagctcgcaaacattgatcactcaatcgcagatgtaaagaaaaccgctgaaaagcttaacaaaaacggtctcgtcatcatggcgaacgatggaaaaatcagcgcgttcggccctaaatcaagatacggcctgatccatgacgtgttcggcgtgacaccggctgataaaaacatcaaagcgtctactcacggacaaagcgtttcttacgagtacatttcaaaaacaaacccggattacctgtttgtcattgaccgcggtacagcgatcggtgaaacatcatctactaaacaagtcgttgaaaatgattatgtgaagaatgtaaacgcagtgaaaaatgatcatgtcgtctaccttgattctgctacttggtacttatcaggaggcggtcttgagtctatggcacaaatgatcaaagaagtgaaagacggtttagaaaagtaaaaccaaaaagagcctccgctaaatagcggggctctttttttgttaatcagcgtgccggctgctgttcggcagggcgctgaggtttctttaatgtgaatgagagaaggaagccgacaagtgcaatgacggcagccactataaaagcggcgttcatgccgtgcagggcggcgtgcttcacatttgtcgtgcctgcatgtgccgcctggttgctcatcacggaaaccaatagtgcggttccgatcgagccgccgacttggcgaatcgtgttgttcatcgcagttccgtgcggaatcaagtggcgcggcagcgcattgattccggctgttgtcaccggcatcatgatcatggcggtgcctaagagacgaacggtgtataaaacgacaatccaagcgagtgacgtatggtcagtcagctgcataaacggcagagatgtcaggaagatgatgcagaaaccggcaatcgccagccctcttccgccgacacggtcaaaaattctgccgataatcggcgacataaagcccatcacaacggctcccggaaggagcataagccctgtatcaaaagctgtgacgtctctgacattttgtgtataaagcggcaggatggtttccgtaccgatcaataatgcaaagacgagggttcccagcagtgttgttaaactgaaaatgccaaacgtgaagacgcggaattccagcatcggtttttcaagcttcatttgtcttgtgataaacaagagcagcgcgatgacacccaccagcagtgaaatcaagacggttgaactggaccagccgtaagagccgacgcttgagaagccgtacagaaggccgccgaacccaaatgttgaaaggatgactgataaaatatcaatctgtgtttttcttaaagtcgtcacgtttttcatcaggatgctggcaagaatcaaatcaatcacagcaaacggaagaataatataaaacaatgatctccaagagaaagcttcgacagcccatccggaaagagtcggtccgatcgcaggcgcgaatgagatgaccaatccgaccatacccatagcctggccgcgtttttcaatcggaaagattgtcaggaatacagtctgcatgagcggcatcataatgccggctccggccgcttgaatgatacgcgctgtcagcagaaccgggaagttcggcgcgaacgctccgacgactgttccggcagtgaaaatgctcattgctgtgatgagcagcgcccggcttgtgaatttctcaattaaaaacgcggtaatcggaattaaaatcccgttggttaacataaatgatgtggtcagccattgtgcttggttggcatcgacattgaaatccctcatgatatggggaagtgcggtaatcaacaatgtctggttcaaaatcgccacaaacgctccggctaacaaaatgccgacaatgacagaacggttaaaaggtttttgttcaatacttgtgttcaatacatatcccttcttttctctaagtaattaacagtgtttttaacatggaaacgggctgtgttaaaacactggtttgttccagatagccaatcagtgatttgagtaaaaaagcgcggggttcttccttcttcgcttcttcctccagcatggcggctgcggatgtcagttcatctacgtcatagtccgcggcggacagggaagagatgcctttatgtaattccttcaggctttccgataataggactgatttatcctttggcttgtaggaggatgctgaatgaatataaagctcgatggcttcgggcggaagaagagactggcgggtttccctgtttttgataatctgattgagggtgctgatgataaactctgcgatcgggtcaagctcaagcggtttttcctcgattttgatcagcattaaaaactcacgcatcatgccgtgaagaatgataaccaaatcccacacaaacgggagaatggtttctccatacgcctggatcagcgaatcgcggtgccagcagataatcgtcgatctggtctgatggatatgctgtttgacccggtcattatgcagcttggggtttccgtaggtcagcatattgaaaaactgctgattccgcctgaagccctccagttccattttgaccttttgcgtcaaacgctcctccggtgtaagtgcggtattttcctgaagtcttgaggctgcggccaccatttgcttctggttaaatgacagcagctccaaaagcagatcttctttagattggaacagcttatatatcgaagcttttgacatcttacattcttctgcgatcgcctgcatggaaaccgacgtaaaatccttttccgaaaaaagctttcgcgcggctaacaagatatctgtttttttatcaagcatctcatggcttccttctttcttgaacattagaaaacccattggttcacagaaaaccaatgagtaactatgaaaaaattttaccaaataaacaaaatagaagtcaatggattttaaccgggtaaatgaaaggcctgccggaaaatccgacaggccgaataagagcttatttttcaactttaaatccttgtttttcaagcatttcacggatgtgcggatagtacaggcgctcatagtaggaagcgatgctctgtgaccaatttcttgtttcttttccgtttgtccgtttattcatgtattcagacatctgttcgtcgtatgcctgaatgtgagacgtcagctcatcctgattcaaataagtttcctgatgattgacagcttcctgcggcaagcgcggttttttcgctgaacggtcggcaggatgcccaatgacaaggccggataaagggaacacgtattttggaagctcaagcagttcgatcagctcttgagggtttccgcgaaccgcaccgatcggaactgtgccaagtccgagtgactcagccgctgctgttgctgtgccgagggcaataccagcgtctactgcgccgacaagaacagattccaatccatttgtgatttccattttgaaatcatgcagatcttcaagcgcaattttggcccgattgaaatctgcgcagaacagcaggaaaacaggagcttgatcgatccatggctggccgcctgccagctcggagattttctttttgcgctctttatcctggactgtgatcacagtcacctgctgtccgttgatagaagaaggggctgattgcaccgcttcaatgatttggtccaattgctcctgagctacaggctcatctgtgtagctgcgaatcgagcggtggtcttttaaagatttaatcacttcattcatatgggacaccctttctttactcgctaagctctgtgcggacaacatcaagaggggcgctcagcagttcttttccttttgcgacaaacccttggaaatgcgcagtttcgttatggaatttcattgccgcttcatctttccatttttcaagcatgacaaatgtattttcttcgcctactttttcgaataggtcgtattgcgcgttgccttcctcagctcttgaatgctgaacaagtgattgagcctcgctcaaaaattcctcgcgtttttctggttttactttgatgtaagcttgtaatacgatcatttaaatctcctccgttgttatgcgaatttattgttcgaatttcatcgaactaaatgtaacatgtattctaaatgaggtaaaggaaaaacccttatatagtaaaattgtcattctaattgttgtgtgatacatttgtgtcatgaacattccaaaccatccagaaacagaaacattgcagctgacaaaggttcttcatgcacttagtgatccgcttcgtttagagctcgtcaagcaattagctgaagcaaaagaaaaaacgtgcagcacctgtgcagatgtgcaggttgccaaatcgactttgtcgcatcattttaaagttttgagagaatcgggcatcgctcaagttcggatagaaggaaagcgccggtattattcgcttcgcgctgaagaccttgaaaaggcatttccgggcctgcttgaagccgtgctgaatgtagaccaggaccgctggtgaatcaatcccctgtaacggggatttttttatgtccgtaaaccgctttgaaaagccgctgcacacccgcctgaatatcttcttccttcagccgtgcaaagccgataatgagagcaggcctgcccgtttgccgcttgttttccttcaagttaaatcggctcattccgaatatttcaagctgcagcccggcagcatgtgacaggatgtcttgttcggtgcgcctggtatcaaattcggtaacaaaatgcagccccgcatttgccccttttacggtaacctctccgctgaactctgcttctaaagcggtgatcaggcgttctctcttttctttataatgctgcttcattttttttatatgcttctgatattcaccagactcgataaattcctgcagggtgagctgtgtgagtgatgagcaagtctgcagatcatagccccgctgtttgtatgccctcaacagctcaggcggcaacaccatatagctgatccgcaagccggggagaagggactttgaaaaggttcccatatagatgacattttgaaaacggtcgaggctttgcagcgccggaatactgtctacatcatatgtgaattcactatcataatcgtcctcaatgatatatcggcgcggctcctcggctgcccagttcagcagctgaattcttctggatacaggcataatcgttccggacggaaactgatgcgacggggtggtcaccagcacatctggctgctgtctggtgatttcagcaatcgacatgcctttttcatccagcatgatcgtctttacttgttttccggcattcttcaaaagctgatacatgcgcctgtagccaggctcctccatcgcatacacggcttccttgggtaaaagctcagtcaacagctgcatgagcacctgtgtgcctgcccctatgatcatttgttccggcctgcattttacacccctcgtcagggaaatgagcctcgtaatggccgctctcacttcatatatcccttgcggatgtgacatatcgccgagcgtgcggtatgagcgggaggccgctttttgctcgcagcggaaccagcttttgatcggaaaatggtctgtatcggaactcatgtgtgaaaacgatatccaatcgctctggtcgatgtgaatctcttttaggtcatccggcagtgcaaatggagggtgctcctcggcggaaaacatgtctagttcctccacgaagaaaccctttcgttcaatggcgtacaaatacccctcagccagcagctgctgataggctgaattcactgaatttacgctgaccttgagattttcagccagctcccgcttggagggaaccttcgagtgcggcagcagattgcggctgaggatttcttttttcagcttttgataaatttgctgatagatataatcggcttgttctgaacgatcgagtgtaatcgtgatatccatttgtattttctccttctgataccatcaaaaagttataattggtacttttcatcataccaaagagaagtcagaatgataagaaaataccgacagggggatattcacatgagtcaaacaacagcaagcatcacaactgcacaatggcagcaaaaacgggatcaatttgtgtcaaaaggtgtgagcaacggcaaccgcagtctggcggtcaaaggagaaggggccgagctgtacgatctggacggccggagatttattgattttgcaggcgccatcggcacgttaaatgtcggacactcgcatccgaaggtggttgaggctgtgaagcggcagacagaggagctgattcatcctggctttaatgtcatgatgtacccgacttatatcgagttagccgaaaaactgtgtggcattgcaccgggcagccatgagaaaaaagcgatttttcttaactcaggggcagaagcggtcgaaaacgctgtgaaaatcgccagaaagtatacaaagcgccaaggcgttgtctcgtttacacgcgggtttcacgggcgcacgaatatgacgatgagcatgacaagcaaggtaaaaccttataaattcggtttcgggccttttgcgccagaggtttatcaagcgccgttcccttattattatcagaagccggccggcatgagtgatgaaagctatgacgatatggtcattcaagcattcaatgatttctttatcgcttcagtggcgcctgaaacggtggcgtgtgtcgtgatggagccagtgcagggagaaggcgggtttattattccttcgaaacggttcgtacagcacgtcgcttcattctgcaaagaacacggcattgtttttgttgctgatgaaatccaaaccggctttgccagaactggcacttatttcgcaattgagcactttgatgtagtgcccgatctgatcacggtttctaaatcgcttgcggcaggcctgccattaagcggcgtgatcgggcgttcggaaatgcttgatgcggcagcgccaggggagctgggcggcacgtatgccggcagcccgctcggctgcgcggcggctttggcagtcttggatattatcgaagaagaaggactgaatgagcgatctgaagaaattggcaaaatcattgaagatagggcgtatgagtggaaaaaagaattcccgttcatcggtgacatccgcagactcggggcgatggccgcaatcgaaatcgtcaaggatccagacacgcgtgagcctgataaagcaaaagcagcagcgatcgcggcctatgcgaatcaaaacggattacttttgctgacagcgggaattaacggtaatatcatccgctttttgacaccgctcgtcatctcagacagccttttaaatgaagggctcagcatcttggaggcgggcctgcgagcttaatcattggaaagaaaacggctgggtctgctatcattttaagtaatcatgaaaagaaaggaatgttcaatatgccagatcaattaacggtctacaacccggctacgggcgaggagatcaaaacgattcctcagcaatcagccacagaggtagaagaagccattgaacgttcacatcaagcgtttaaaacgtggtctaaaacatcagcgaacgaaagagcgtctcttttgaaaaaatggtatgagctgattgttgaacataaagaagagcttgcagatttaattacaaaggaaaacggaaaaccataccaggaagcagtcggcgaggtactttacggcgcaggctatatcgaatggttcgcagaggaagcgaagcgtgtgtacggaagaacggtcccggccccgacaacgggtaaacgaattgttgtcacacgccagccggtcggccccgttgctgctatcacgccctggaatttcccgaatgcgatgattacacgcaaagcggcgcctgctcttgccgctggctgtacatttatcatcaagccggcgccggacacaccgctgtctgcttatgaactagcgcgcctcgcatatgaagcgggcattccgaaggatgttcttcaggttgtaatcggcgatggagaagaaatcggaaatgtgttcacaagcagtccgaaaatccgcaaaatcacgttcacaggctcaacacctgtagggaaaatccttatgaaaaacagcgcggacaccgtgaagcacgtctcaatggaactcggcggacacgccccgctgatcgtagatgaagatgcagacattgaccttgccgttgaacaggcgatggcgtccaaataccgaaacgccggccaaacctgcgtatgtgccaaccgcctgatcgttcatgaatccattaaagatgaatttgctgcgaaactgagcgagcaagtgtctaagctgaaagtcggaaatggacttgaggaaggcatcaatgtcggcccgatcatcaacaaacgaggcttcgaaaaaatcgtcagccaaatagatgatgcggttgaaaaaggcgcgaaggttattgctgggggcacatatgaccgaaacgatgacaaagggtgctactttgtgaatccgacagtgctcaccgatgtcgatacgtccatgaacatcatgcatgaggaaacattcggcccggtcgccccgatcgtcacgttttctgatattgatgaagcgattcagcttgccaacgatacaccgtatggcttggctgcttacttcttcacagaaaactaccgccgcggcatctatatttccgagaatttagagtatggcattatcggctggaatgacggcggaccgtcagcggttcaagcgccattcggcggaatgaaagaaagcggcatcggccgtgaaggcggttcggaaggtatcgagccgtaccttgaaacaaaatatttgtctatcggtttataaaagaatgcacgctcctgagagctgccggattttccggcagctctttttgtgttccggcgaataatcacaacaattccagccaaaataacagcaaatacattttgaaagaaggttccccaacaatggatttattattggctcttctcccggctttgttttgggggagcattgttctcttcaatgtgaaattaggcggcgggccgtacagccagacactgggaacgacgatcggggcactcattgtttctatcgttatttacttttttgttcagcccgttctgtcccttcgcatttttattgttggaatcgtatccggcttattttggtcacttggacaggccaaccagctgaaaagcattcaattgatgggcgtgtcgaaaacaatgccgatttccacaggaatgcagctcgtttccacctcgctgttcggtgtgatcgtgttccgcgaatggtcaacaccgattgcgattacgcttggcgttctcgctttgatctttatcattgtgggaatcattctcacgtccttggaagataagaatgataaaaaagagggcgagccaagcaatttgaaaaagggcattttgattctccttgtttcgactcttggttatttggtttatgtagtcgtggctagattattcaatgtgtccggctggtccgcgctgctgccacaggcaattggcatggtggtcggggggttagttttaacctatagacacaaaccctttaacaagtatgcgatcagaaatattctcccagggttaatctgggcaggcggaaatatgtttttgtttatttctcagccgcgagtcggcgttgcaacgagcttttccctttcacaaatgggaattgtcatttctacgctcggcggtattttcatcctgcgtgaaaagaaaacgaaacgccagctaatagcaattgcgatcgggattatcctgataattgccgccgccgtattcttaggaatcgccaaaacaaattcataacaaatggaggaggatgtatatgtatccggatttaaaaggaaaagtcgtcgctattacaggagctgcttcagggctcggaaaggcaatggccattcgcttcggcaaggagcaggcaaaagtggttatcaactattatagtaataaacaagatccaaacgaggtaaaagaagaggtcatcaaggcgggcggtgaagctgttgtcgtccaaggagatgtcacgaaagaggaagatgtaaaaaatatcgtgcaaacggcaatcaaggagttcggcacactcgatattatgattaataatgccggtcttgaaaatcctgtaccatctcacgaaatgccgcttaaggattgggataaagtcatcggcacgaacttaacgggtgcctttttaggaagccgtgaagcgattaaatatttcgtagaaaacgatatcaagggaaatgtcattaacatgtccagtgtgcacgaagtgattccttggccgttatttgtccactatgcggcaagtaaaggcgggataaagctgatgacagaaacattagcgttggaatacgcgccgaagggcattcgcgtcaataatattgggccaggtgcgatcaacacgccaatcaatgctgaaaaattcgctgaccctaaacagaaagctgatgtagaaagcatgattccaatgggctatatcggcgaaccggaggagatcgctgcagtagcagcctggcttgcttcgaaggaagccagctacgtcacaggcatcacgttatttgcggacggcggtatgacacaatatccttcattccaggcaggacgcggttaaacaaaaaaagcgacccagacatcacatctggatcgcttttttattacgcacgctttttcttaacaagtgctgctacagataaaataatggcagccgcagacagcacaatcgctgtaatgtctagagctgaagaacctgagttttcggaatcgtcttttgttttcgtggcgctgtgctcatctgtcacttgttttgcagacgtgatgtttgtaatggaatgaggtgtatcggcatcctcgtcacctgtccactcaacaatgctgccgtctttgtaatattggtatgcgtcccaagcagcttcctccgctttgtcagggtttttggcaacaaaggtaaactgctggaactgtccttcctgaatgcctccgtcagtcgcctcccatgtcacggacactgatttgtcatcatgtttttgagtggagaccttccagcccggaattggctcatattgctggaattcaacatccttcggcattttgaggactaccttcgttgtcggcagatttttctctgaaggaaccttcattgtatacgtttcccaagagcctgcagcagactcagccggttttacagaaacatgcgcgctggcaggggccgtaaagaataagagggagccgacaatagccggacatagtgtcaatgcgatttttttcaacaacgtaaacactccttaattggtctttgtaaacatgatattgatttcgttaaagtcgccggtcaggccgtggactttgatcttccagtttcctttttcattaatcgacaggttttgatcctggaagacgccttttgttttttcttttaatgtaaaagtgcttttgttttcgctgcctgacaggcctgttttataaacggttaacgtgatttgctggatgtttttcacgggatctccgttatggtcggtgacccgcagctcaaaaacattttttccgggctggtttgggctgatgctgagagaaacgctttgtccgttctcaatcgctttggtttggtagaacggttccggcgccggctcaggcgggcttggcaggcttgtaaacacggccgctgtgatcaatacagcgatgccgattgcccactccgctttcaacgttcggctgattcctgtgcggcgctgctttctggtaagcagaaaatgaatcgtgcctaagaccagcatgaaaacaaacagcccgcttttcactaaaagagcttgtccgtacgctgtatggaacagtgaatccattgaacgaatgatgaaaaatccattgagcaagcctgaaaacaaaatgacgccgactgcagtgagcgcccatggggagaaccgtctgaccgtctcccacgcgagcgttttgtcaggctgcctccattcttttgagagcagcaaaacgagtgccgctattccgccgacccagatggaagcggaagttaaatgaaggaaatccatcaaaatgccgaccgttttttcttcaacgacagcagcatgcccggtaaacgccttggcaagcaggagaccgaaaaagaaaatgagcggcgctgtccaatagccaaaggatgaaaagcggtttttccgtatcgcagggatgacagacagtgcgagcagcacgaacagcgcagcctgtatgatccaaatggagccgcctgctgtctcaaacagtgtttctctgatgtagcccgcctggaatgcgctgccccagccgccgcctgcgttcgcttttgtctgaatcggaagctgaagcaaaagcgccagacccagtgctgcgatcgagccggtcaggatacgtctcgtccgtttgacgagctgttctgatttccctttataccagaaaagatggaagaaaaccgttccgataaacagagataaggctgtatacagaatcgcgcgatctgctgctgttcccggattcagcgctgaatcggctgctttttggctgctgaatccgccatccgctttcccgatactgaacggaatgacgccggaaacaggatgtccatccgcggatacggcattccattccgctctgtacacatctttaggcagattcttcttcagcttcactgtcatgatgtgatgattatcttttttgatttcagtcttgtccgtatccacacggtcgccgtttgaattatagactttaatgtaatgaaacccttcttcaaccggttcattaaattcgatttccacctgcgcaggggcgctttttaattcgctgttttccccaggtgaagatttgacaatataggcgtgagcaaagcttgttttcggcaggaaaacaagaaaaagcagaaggatgatccaccatctgtttcgcttcatcactcagacaccaccttccgctgtatgtgttgtgttatttcttggtgcaggtgcagcgtttctttcggtcttgaagcatatcttccagcgcttggtcgaaagtgcggacggctccgccgaatcctttttgaaatcgttcggcatggtcaagtgtcgcaaacggaatggcctgcggctggcagcagtgcaggtttaattcagcatttacgacgaaataagccgaaccggcactgacggttgtctgtaacagaaaatctctgcaaatcaagtgtgaaacctcttccgttttatccgcgtaacgcaaaaacgcgcaatgtgcgcagcatagctgttcaatgtcttggtttaccgtaatcagctgaaccgaatgagcttgattgacgggcttcaagcaatagctgcacatatgatccgtttgaggtgttcgggcggggagcgtgatgccgccggccgttttaatgacctgatttgactgaaccagctgattgacatctctgtataccgtcatttccgaaacgccaaaccttgcgctgatgtcagaaattctgagcgcgccttcttctttcagccacttcagtatgtgttgctgtctattaatcggaagcattcatacaccctcttcattaagatctatttaagcgtagaggattttagagacagagacaagtaagctgatgataaaaaatgtgaaaatgtgttgaacaacaacaaaacgaaacagaagggactctggtataatagacatatggaatagaaagtgaggaataccctatgaaagaaacaccatgcccgaactgcggcaaacctttgacaggcgacatggtcagatcatcaaatgtgccttgtcaatttcgctgcggacactgccgggaacggctttatgaatataaagtatcagctccgattatgctggtatcattagcggccatcgtgctgctcatttatcttttgctgctcctccgcaatgcggcaggttcaatgctgccggctgtacagcacgtgccgatggctgtttttgcgcttgtgtgcgcctatcccgtttttattgtgagtgagcgaatgatcgcaaagtacgtgattcaaaatggcaacatcatttatagaggaaagagaaaaggctcctgatatcaggagcctttttatttttaaaaaattgtcacagtcatgtgccaaagtcctctttactttcaattgtatagggactgtaagcgttttaacatagagtcaaagggaagcatcattctctgaacatatttttttatcttacagcgacaaacaaaacagggagggtttatatatgcagcagcaagaacagcagcaaggcggcatgaaagtgaaagtgcaacgctttgggagttatttgagcggaatgatcatgccgaatatcggcgcgtttatcgcgtggggtatcattaccgcgctgtttattccggcaggatggtttccgaatgaacagctgaacacgctggtcagcccgatgattacgtatttattgccgcttttgatagcgtatacaggcggaaaaatgatctacgaccaccgcggcggagttgtcggagcgacagcggcaattggggtgattgtcggatcggatattccaatgtttttaggcgcaatgattatgggtccgcttggcggatacctcattaaacagactgataaattattcaaggataaagtcaaacaaggctttgaaatgctgatcaacaactttacggcagggattgtcggcgcggctttaacgattctcgcgttttacgccatcggcccggttgtcctgacgctaaataaattgctggcggctggtgtggaagtcattgtacacgctaatttactgccgatagccagtgtttttgtagaaccggcgaaagtgttgttcctcaacaacgccattaaccacggaatcttaagcccgatcggaatcgagcaagcatcccaaacaggaaaatcaattctgtttttagtagaagcaaaccctggaccggggctcggcattttgctggcgtacatgttctttggcaaaggatcttcaaaatcaacggctcccggtgcggcgatcatccatttcttcggagggattcacgagatttacttcccgtacattctgatgaaaccggccctgattctcgcagccattgccggcggagcaagcggactcttaacgtttacgatctttaatgccggacttgtcgcggcagcgtcaccgggaagcattatcgcattgatggcaatgacgccaagaggaggctatttcggggtattggcgggtgtattggtcgctgcagctgtatcgttcatcgtttcagcagtgatcctgaaatcctcaaaagctagtgaagaagacttggctgccgcaacagaaaaaatgcagtccatgaaggggaagaaaagccaagcagcagctgctttagaggcggaacaagccaaagcagaagaagcgtctgagctgtctcctgaaagcgtgaacaaaattatctttgcgtgtgatgcgggaatgggatcaagtgccatgggggcatccatcttaagaaacaaagtgaaaaaagcggagcttgacatcagtgtgaccaacacggccattaacaatctgccaagcgatgcggatattgtcatcacccacaaagatttaacagaccgcgcgaaagcaaagctgccgaacgcgacgcacatatcagtggataacttcttaaacagcccgaaatacgacgagctgattgaaaagctgaaaaagtaatcttatagaaagagagtgatactcatgcaagtactcgcaaaggaaaatattaaactcaatcaaacggtatcatcaaaagaagaggccatcaaattggcaggccagacgctgattgacaacggctacgtgacagaggattacattagcaaaatgtttgaacgtgaagaaacgtcttctacgtttatggggaatttcattgccattccacacggcacagaagaagcgaaaagcgaggtgcttcactctggaatttcaatcatacaaattccagagggcgttgagtacggagaaggaaacacggcaaaagtggtattcggcattgcgggtaaaaataatgagcatttagacattttgtctaatatcgccattatctgctcagaagaagaaaatattgaacgcctgatctccgctaaaagcgaagaagatttgatcgccattttcaacgaggtgaactgacatgatcgccttacatttcggtgcggggaatattgggagagggtttatcggcgcgctgcttcaccactccggctatgatgtggtgtttgcggatgtaaacgacacgatggtcagcctcctcaacgaaaaaaaagaatacacagtagaactggcagaagagggacattcatcagaggtcattggcccggtcagcgcgattaacagcggcagtcagcccgaagagctgtaccggctgatgaatgaggcggcgctcatcacaacagctgtcggcccgaatgtgctgaagctgattgctccatctatcgcagaaggtttaagacggagaaacactgcaaacacactgaatatcattgcctgcgaaaatatgattggcggcagcagcttcttaaagaaagagatatacagccatttaacggaagcagagcagaaatccgtcagtgaaacggtaggttttccgaattctgccgttgaccggatcgtcccgattcagcatcatgaagacccgctgaaagtatcggttgaaccatttttcgaatgggtcattgatgaatcaggctttaaagggaaaacaccagtcataaacggcgcactgtttgttgatgatttaacgccgtacatcgaacggaagctgtttacggtcaataccggacacgcggtcacagcgtatgtcggctatcagcgcggactcaaaacggtcaaagaagcaattgatcatccggaaatccgccgtgttgttcattcggcgctgcttgaaactggtgactatctcgtcaaatcgtatggctttaagcaaactgaacacgaacaatatatcaaaaaaatcatcggccgctttgaaaatcctttcatttcggacgatgtgacccgcgtagcgaggtcacctctcagaaaactgggagaaaatgataggcttgtaggcccggcaaagaaaataaaagagccgaatgcactggcggaaggaattgccgcagccctgcgcttcgatttcaccggtgaccctgaagcggttgaactgcaagcgctgattgaagaaaaaggatacagcggcgtacttcaagaggtgtgcggtattcagtcccatgaaccgttgcacgccatcattttaaagaaacttaatcaataaccgatcacccgtgacacaatgtcacgggctttttttactatctcgctatctagtataatagaaagcgcttacgaaaacagggggaggagaatgacgatgaaacaattcgagattgcggcaataccgggagacggagtaggaaaagaggttgtagcggctgctgagaaagtgcttcatacagcggctgaggtacacggaggtttgtcattctcattcacggcttttccatggagctgtgattattacttggagcacggcaaaatgatgcccgaagatggaatacatacgcttactcaatttgaagcggtttttttgggagccgtcggaaatccgaagctggttcccgatcatatatcgttatggggcctgctattgaaaatccggagggagcttgagctttccattaatatgagaccagccaaacaaatggcgggcattacgtcaccgcttctgcatccaaatgattttgacctcgtggtgattcgcgaaaacagtgaaggcgagtatagtgaagtcggcgggcgcattcacagaggcgatgatgaaatcgccatccagaatgccgtgtttacgagaaaagcgacagaacgtgtcatgcgctttgccttcgaattggcgaaaaaacggcgcagccatgtgacaagcgccacaaagtctaacggcatttatcacgcgatgccgttttgggatgaagtctttcagcagacagccgctgattatagcggaatcgaaacatcatctcagcatattgatgcgctggccgctttttttgtgacgcgtccggaaacgtttgatgtcattgtggcgagcaacttgttcggtgatattttaaccgacatcagctcaagcctgatgggaagcatcggcattgcgccttctgcgaacatcaatccatccggcaaatatccgtccatgtttgaaccggttcacggctcagctcctgacattgccggacagggccttgccaatccgatcggccagatttggacagcgaagctgatgctcgaccacttcggagaggaagaattgggggcgaaaattcttgatgtaatggagcaagtgactgccgacggcatcaaaacacgcgacattgggggacaaagcacaacggctgaggtcactgatgaaatctgttcgcgcttaagaaagctctgatgaatcaggccggtggcagatggctgccccggcctgtccatttccttacgaaaatttccacgaaagtctaaccaagcagatccaaatgctgtataataatttggaattcttaggaaagcatcgggtgaaggaagttgaatgcaaaaacaatcacgttaaagaaaaaaagaaaaatcaaaacgatcgttgtactcagtatcattatgatcgcagctctcatttttacgattagattggtgttttacaagccttttcttattgaaggatcatcaatggccccaacgcttaaagactcagaaagaattctggttgataaagcagtcaaatggactggcgggtttcacagaggagacatcatagtcattcatgacaaaaagagcggccgctcatttgtcaaacgtttaatcggtttgcctggtgacagcattaaaatgaaaaatgatcagctatacataaatgataaaaaggtggaagaaccatacttaaaggaatataaacaggaggtcaaagagtcgggtgtaaccttaacgggtgacttcgaagttgaggttccttccggtaaatattttgtgatgggagataaccgtctcaattcactggatagcagaaacggattgggcatgccttctgaagacgatattatcggtactgaatctctcgtcttttatccattcggtgagatgagacaggcaaaataaaatgcaatgcaaaaagaacatggaacatgacggcaccgataataaagcgccgtgcacgtttaaaaaaatgatgatgaaacggtgcggagccggctttccgccccgttttttatgatagaaagcgttttgaagaaaagggccctgttgaaataaacagaatcaggattggcgaagccgtgaagcgcatcgaattggtaaatctcaagatgggtatgctgtttttcccgcagttttttgataagaagcgctacgtcaaacgacggctcataattagggaaaaacaataggaccgggcaggctggcacgtgatgaagagagtcgcgtatccgggaaccgtaataacaaaccgatccgctcacctcaggcatactgctgcatttccatgcgatagtagcccccacgctgaatccaatcacaaagatgtgccgtccggcgttttgcctgatcacattctggatgatggtttctcccgttttcagccgttcgtgttttgtaaattgttcgtatgccgttttttcttcttgcagtgtgtagacttcattctcgccgagcaggttgggcgtcaacacatcatatccagccattttgatcagccggcccatctttttcatatggctgtttacaccgtatatttcgtgtacgagaatgacaagcggttttggggacataacggcctccttttgtgttttttccattatatcctatcgtttcactttaggctgagatataatggtcaaaaaaggagatataaaatgaactcattatctttgcctcaccgctatccatttttgtttattgatggcgtgacggatagcgagcccggcaaacatgcggcagcttataagctgattagtgagaacgactggtttatcactgatacgcaaacagaaatgccgttttcacttgtgattgaagcgcttgcgcaaaccgcggcttttacaggaattacagatgagaacagcttgggattattgtcttcggtgaagaaagcggaaaagctgggagaagctgtgcctggtgaccggcttgatcttacgtttgaagtcacgcgcaatcggcgcgggtttgtgttcggacatgccaaggcgtcagttggagagcagcctgttgctgaagctgaaatcggcatctatattgaaaaatgaaaaaaacccttcacaacattttgtgaggggttctattttgtgtcgtaatcccgttcgctttgagagttatctctttgctggcgtttgtgtttttcatcattcatattttccttcagctcttcattaggaatcggatcggttaagtcgttgtgctcggggttttcatttggtttgttttgctgttttttttctgtcatgtttgatcacctcaccgtttgttttcctcttatccgttctcctcaaacataggaaaccgcttttttgtcccgctgggtataatgtattagaatagagagaagcacaacaaaaagataaagagaggtacatatatgtctgttcaaagagaagatgtagatatcaagctgatcgcaattgatatggatggtacactgctgaacgacgagcagctgatctcggatgaaaaccgcaaagccattcgtgaagcggaggataaaggtgtgtatgtggtgatcagcacgggccggacgcttatgacgtgccgggaactggcggaatcgctaaagctgtcatcctttctaatcacggcaaacggcagtgaaatttgggattcgaattttaatttggtggaacggaagctgcttcatacggaccatattcaaatgatgtgggatttgcggaataagcacaacactaatttctgggcttctacggtgaataaagtatggagaggcgagtttccggaaaacattacggatcatgaatggctcaaattcggctttgacatcgaggatgacgatatccgaaacgaagtgcttgaggagctgagaaaaaacaaagagctcgaaatcacaaattcaagtccgacaaacattgaagtcaacgcgcttggcatcaacaaagctgcagcccttgccaaggttacggaaaaactcggctttacaatggagaatgtgatggcgatgggcgacagccttaatgacattgcgatgatcaaagaagcgggtcttggcgtcgcaatgggcaatgcgcaagacatcgtaaaagaaacggctgattatatcacggatacaaatattgaggatggtgtcgctaaagcgattcgccattgggtactataaaaaaagagagtcctaagatggactctcttttttagtttggcaggttttattctgggaccatggtaggttttctgacaaaagtatttcacaaactgatatgattcacttataatgaaataaagttcaaaaattcggaatagtcgttccgaatttcgggacaataaatgacataaagcatatcgtttgctttggcaggagggattctgtgtttcagattgatttaaactgtgatttaggagaaagcttcggagcctacaagataggccttgaccaagatattttagagtgtgtgacatcagcgaatatcgcatgcggatttcatgcaggagatcctagtgttatgcgaaaaaccgtcgcgcttgcagcagaaagaggcgtgaaaatgggtgcgcatccgggcttgccggatttactcggttttgggcgccgcaatatggcgatttctcctgaggaagcgtatgatcttgtcgtttatcaaattggcgcgctctctggctttctaaaagcagagggacttcacatgcagcacgtcaagccgcatggcgctttatacaatatggcggcagtcgatcaaaaactgtcggatgctatcgcgaaagctgtctataaggttgatcccggcctgattcttttcggtcttgctgagagcgagcttgtaaaagcgggagaacggatcggacttcagaccgcaaatgaagtgttcgccgacagaacataccaatcggacggcacgctgacaccgcgctcccagccggacgcactcattgaaagtgatgatgccgccgtcacccaggtcatcaaaatggtgaaagaaggggcggtcaaatctcagcaaggacatgatgtgtcattaaaagcagatacagtctgcattcatggagatggagcccatgcgctgacatttgcgcaaaaaatcagaaaacagctcaaagcggctggaattgaagtgacagctatttcagaacagaggtcaacataaaggaggaacaatagatggagcagcagaaaaagacagcaggaaaaaaagcgggcagctggtcattgctgatgggcgccgcctttttaatggcgacatcagcaatcggaccgggtttcctcacccaaaccgcaacattcacaaacacactcgcagcaagcttcggttttgtcatcttaatctctattattttagatattttcgcccaaaccaatgtgtggcgcatcatcgcagtttctggaaaacgaggtcaggaaattgcgaatatggtgcttcccggactgggatatttcatcgccattctcgtcgtgcttggcggactagcttttaatattgggaatatcggaggggccgggctgggacttcaggtgctgttcggcattacacctgaaacaggcgctttaatcagtgccgttatcgccattttgatttttgtcatcaaggaagcaggaaaagcgatggaccgttttacgcaaatcgcggggttcgtgatgattattttaacggtctacgttgcggcgacgacagctcctccagtcggacaggcagtcgcaaatacattcgtcccggaacacatcagcatatttgccattgtcaccctagtgggcggaaccgtcggcggttatatcacatttgccgggggacaccgtttgcttgatgccggaattaaagggaaggaatccattccgcaggtgacaaaaagctcggttgtcggcattttaattacatctgtcatgcgtatcgctctttttcttgcggttctaggcgttgtatcgaaaggcctgcacatcgatgaaagcaacccggcggcttctgtcttcaagctggctgctggaaatgtcggttataaaattttcggattgatcatgtggtctgcggcgattacgtctgttattggagcagcctatacatctgtttcatttttcaagaccttttctccaaaaattgaaaagaattcacgcggtattattatcggatttattgtggtttctacgttagcttttgtcacaatcggccagcctgcgaagatcctcgtccttgtcggttcactgaacggcttaattctgccgattgcgctcggaacgctgcttgttgccgcctacaagaaaaacattgtcggtgattataagcatccgctttggctgacaagcacaggcgcgcttgtagtgattgtaatggcagttatgggaatctacacgttaattacacaacttcctcaattgtggagctgatataagtggagcaattaaacaaaatggcgccaaaggatgtacgcgccctgatacgagaggggaaaataaacgggccgaccgcaggcatgtctggcggctacgcccaagcgaatcttgtggttttgaaaaaggaccttgcttttgattttctgctgttttgccagcgaaatcaaaagccctgccccgtgctggatgtgactgaagcaggttcgcctgtgccgtctctggctgcgccggatgctgatatcagaacggactttccgaaataccgtatttacaggcacggtatcctaacggaagaagtatctgatattacgccatactgggaggacgattttgtcggctttctgatcggatgcagtttctcctttgaacaggcactaatcaataatgggatagctgtccggcatattgatgaggggacaaacgtctcgatgtataaaacgaatatcgattgtgttccggcgggggcgtttcacggacagatggttgtcagcatgaggccggttcctgaacggctggctgtacgtgctgcacaagtgacctcgcgttttccggctgtgcacggagggccgatccatatcggcaatccgggagcaatcgggattcgcgatctcgggaaaccggatttcggagatgccgttcccattcgtgacggcgaggttcctgttttttgggcatgcggggtgaccccgcaagccgtggctatgaatgtaaagcctgaaatggtcatcacacatgcgccggggcatatgctcatcacagatattcgagacgagtcgcttgcggtgctgtagcctctcgtcatcctgatgaacgagaaataaaagaggtgagaaagatgactgtacgatatcaaatcgaacagctcggtgattctgcaatgatgatccgattcggagaagaaatcaatgaacaggtcaacggcattgtccatgccgcggccgcttatatagaagaacagccatttccgggattcattgaatgtatcccggcttttacaagtctaaccgtattttatgatatgtatgaagtgtacaagcatttgcctcaaggcataagctcaccttttgagagtgtcaagcgcgatgtcgaagagcggctggcagaaatagccgaagactatgaggtcaaccgccgtattgtagaaattcccgtttgctatggcggtgaattcggtccggatttagaagaggtggcgaagatcaatcaactgtcaccggaggaagtaatcgacattcatacaaacggtgaatatgtggtgtatatgcttggcttcgcgcccggttttccttttctaggcgggatgtcaaaacgcattgcagctccgagaaaatcatcgccaagaccgtcgattcccgcaggttcggtcggtattgcgggattgcagacaggcgtttatccgatttcaacgccgggcggctggcagctgatcggcaaaacgccgctggctcttttccggccgcaggaaaacccgccgacattgctgcgggcgggagatattgtgaaattcgttcgcatctcagaaaaagactatcacgcctataaggaggagtccaattgagcatgaaagtattaaagcccggactgctcacaacggttcaggatataggcagaacgggttaccaaaaatacggcgttctggccagcggcgctatggacacggtttcactgcgcattgccaatctgttgataggaaacggcgaaaatgaagcaggtctcgaaataacgatgatggggcccggtccgtcgtttcatttttcaaaacagacactgattgctgtgacaggggcggacttcacgctgcgtattaatgacgaggaagcgcctttatggaagcctgtgctcatcaaggaaaacagcacggtcagctttggcccctgcaaactcggcagccgtgcttatttggcggcagctggcggcattgaggtgcctgccgtcatggaaagtaaaagcacatacgtcagaggaagcattggcggacttcatggcagagcgcttcaaaaagaagatgaactgaacattggagagatgtcagctctttcgcaaaccatcctttcccgcttaagttcgcagcttggaaaacagggatttgcagcaccgaagtggtcagtcagccgcggcagatttctgccattgaagaagaatcccgtcattcgggtgctggaaggaaagcaatttgcctttttcacagaagaatcaaaaacgcgtttttatgaagaagcatttcgtgtcacgccgcagtccgaccgtatgggctacaggctcaaaggagaaccgctcgaactgaaggccccgcttgagatggtgtcggaagcggtttcattcggaacagttcaggtgccgcctgacggcaacccgattatcctgcttgcagaccggcagacgactggcggctatccgaggatcgcgcacatcatatccgctgatcttccgattgtttcccaaatcatgccgggcgagcacgttcagtttgagcctgtgtccctccaggaggcagaagcgcttgcggtagaacgggaacagcatataaaagaactgaaaacgagaatgaagatggaatggctgacatagcaaaggggatgaatgatgcagaataaaaataaaaccgtagtcaaatctatggcgctgcttaatttgtttttgcataaaccaagcctaaccttaagtgaactggtgtcgctgacgggaatgccgaagacctctgttcaccggatggtcagctccttggaggaaatggggttcctcagtagggatgcgtccggcgcttattcgctgggattggtgtttttggaattcggacagcttgtcgctgacaggctggatatcagaaaaatagcgaaaccggtgatggaagagctgtgccgggaagtggatgaggccgtgcagttgatcatgagggacggcaatgaagcgatatacgttgagaaaatagaagggacacagactgtgcggctgtatacggcgatcggcaggcgttcccccctatacgcgggagcgtgcgccagaagcattctgtcctttcttccccgtgaagaaatcgaagcatacatcaaacaaaccgagctcatttcgattggctccggaacgattaccgatcccgaaaaactgcttcaggagattgatgcctctgtgcaaaatggctatactgtcagctattcagagctcgaaaactatacggcggcgatcggcgccccgatctttaaccatgagcgccaggtggcagccggcattagcattgcaggctttgaagcgagatttacagaagacaggctgccctatttaacagaaaaggtgaaggacgccgctttacagatttcaagaaaaataggatatacataagtagccaatcttttctctgctgcgtacattaacgtatcgacgttcaagagtggaggaaagaacatggtgcttcgatatacagctctgggcgattccttgacgacagggagaggctccgggctgttttcacccggcttcgtccagcgttttggggacatgatggaagctgacttgaaaacaagaacggcaataaacatatttgccagatcaggcctgaatacagaagagattttgggactcctgtcatatccctatgtgcaaaaatgtattcgagatgctgatatgataacgatcacagggtgcggaaacgatctcatcgattcggtcttagcctaccaaacctctaaggatgaaacgattttcagccgtgtatccgcccattgccatgagaattttgaaaagatgattgccaaagtcgccgagattaaaggagaaaatccttccccgtacgccattcgtgtgttcaacttatacaatccgtttcccgaaattgatatcgccggcaaatggatcacttcgtttaattcacatttagaaacacttgcatcagcaccccatgtcaaaatcgcggatgcctatagcatcttcaaaggcaaagaacaggaatatctgtcctttgacggtgtccatccgaacagcaaaggctatcaagcgatggctgaagccgttcacaagctaggctataaagaattatcagtttcatagaaaacgcgcctcatgacaggcgcgttttttatgtgtgatcgaaatattaaaagaaacttaaaattctctgtcttctgttctacagacaaacaaagtgcgctagaataatggagggcgtaggcaaatatagccataacgttcaatatttcgtatataaggaaggatggtccttttgtttcggatttttaaaatgtcttttgcggttatcattattatactggcgcttattgcttttaactatacggaacacacctctgttatccaatcggtcatgctcgtctttcttggtgcggtcatgtttatgcaggggcttgaagaacgcaaaaaagaaaatgacggctcaggcgcttttaatatttataccgccgtttttgtatggtctgtctcccttatcggttttacacttcatattatataaatctattacacatcctgaaaatgctcgaccgtcgggaacggggtatagaaccgatgaagcaaggctttccactcttgatactctgaagaaccgcgaaagccttccgtatggtcctcaagtgtttcccactccacaagaagcagatatttatgcgtttcctccatgcattttgataacgagtgcgtgatatagcccttcatgccggaaataatcggcgccgcttgccggaatgcatcctcaaactcttgttcaaggccttctttaatgtgaagcattgctgcctccctgaccatgctatcccttctttctgtcttttcgaatagtctacagcaaacgataggagatttctgcaaaatcggtgaacttttccttcattttcaaaaaaatcttgcacgcaccaattcaattaagagaaaataacaagtggaaggcaggggaaagtcatgttaaaaaagtgtattctactagtatttctatgcgtcggattgattgggttaatcggatgctccaaaacagattcaccagaggatcgcatggaagcattcgtgaaacagtggaacgatcagcaattcgatgacatgtatcaaagcctgactaaagatgtcaaaaaagaaatctccaaaaaagatttcgtcaacaggtataaagccatctatgagcaggccggcgtaaaaaatttgaaagtcactgcgggagaagtagataaggacgatcaagacaacaagacaatgaaacatatcccgtataaagtcagcatgaacacaaatgccggcaaagtcagcttcaagaatactgctgtgctgaaattagaaaaaacagatgacgaggagtcatggaatatagattgggacccatcgtttattttcaagcagctggctgacgacaaaaccgtgcaaattatgagcattgaaccgaaacgaggccaaatttacgataaaaatggaaaaggtttagctgtcaatacagatgttccggaaattggaattgttcccggagagcttggcgataaaaaagagaaagttataaaagaactcgccaaaaaacttgatttgactgaagacgacatcaagaaaaagctggatcaaggctgggtaaaagacgattcgtttgtgccgctcaaaaaggtcaagcctgaccaggagaaattagtttctgaagcgacgtcattacaaggcgtaacaagaacgaatgtcagctcccgctactatccgtatggcgaaaagacagcccatttgacaggctatgtccgcgccattacagcggaagaactgaagaaaaagaaagaaggaacgtacagcgatacgtctaacatcggtatcgccggacttgaaaatgtgtatgaaggcaagctaagaggcacaactggctggaaaatctacgtgccgcaaaccggggaagtcatcgctgaaaagaaagcaaaggacggcgaggatcttcacctcacaattgatatcaaaacgcaaacgaagctgtatgatgaactgaaggatgacagcggggcggcagtcgcgctgcagccgaagacaggcgaaacactcgcccttgtcagcgcgccttcctacgatccaaacggatttattttcggctggagcgataaggaatggaaaaagctaaacaaagataaaaacaacccgttttcagcgaaattcaataagacatacgcgccaggttctaccattaaaccgattgcggctgctattggaatcaaaaacggcacccttaaagccgatgagaagaaaacaatcaaaggcaaggagtggcaaaaagattcgagctggggcggctattcagtgacacgtgtgtctgagagacttcaacaagtcgatttggaaaacgcccttattacgtcagacaatatttattttgcccagaatgcgcttgatatgggagcggacaccttcacaaaaggcttgaagacattcggtttttcagaggacgttccgtacgaattcccgatccagaaatcgtctattgcaaatgacaagcttgattcagacattttgcttgcggatacaggctacggacaagggcaaatgcaaatgtctccgcttcacttggcaactgcttacacgccatttgttgacaatggagaccttgtcaaaccgacgctgatcaaaaaagattcacaaacagctgatgtttggcacaagcaagtggtcacgaaggaaggagcggcagacattacaaaaggtctgaaaggcgttgtggaagatgagcgcggatcagcgtatcagcctgtcgtgaaaggaatcacagtggctggaaaaacaggaacagccgagctgaaaacatcaaaagatgataaagacggcacggaaaatggctggtttgtcggctacgattacaaaaacaaagacctgcttgtcgccatgatgatccaaaatgtgcaggaccgcggcggcagccactatgtcgttgagaaagcgaaaaagcaatttcaatcgaattaaaatgtctttttaaaaggagcgaaaggaaaaagaggatctgaggccgaatgaactagtaaggggcaaaacccggtttatacaaagaaaagagggattttgcatgcagcgtattcaattggcggaggatcttcaattttcaagagtcatacacgggctttggcggctgaatgaatggaactattcagatgctgaacttctaagcctcattgaatggtgtatcgatcacggcatcacgacctttgatcatgcggatatttatggaggctatacgtgcgaaaagctgtttggaaacgcccttgccctttcgcctggattaagagaaaacatagagttggtcacaaaatgcggtatcgttcttgaatcgcctgaacggcccgctcacagatcgcatcattataacacaagcaaatcgcatattttggcatccgttgagcaatcgcttatgaaccttaggacggattatatcgatatgcttttgattcacagaccggacccgctcatggatccggagggggtagcagaggcgtttcaggccttgaaatgctctggcaaggtcaggtactttggcgtttcaaattttaaagatcaccagtatcggatgctggaatcatatttgcctgagaagctcgtaaccaaccagattgagctttccgcatacgaattagaaaatatgctcgacggcactttgaacctgtgccaggaaaaacgtattccgccgatggcttggtcgcctctggcaggcggcaaagttttcactggtgacacggaaaaagaccggcgtgtccgcacggcgcttgaatccgttcaagcagagattggcgccgcttcattggacgaggtgatgtacgcatggctgtatacgcatccggccgacatcatgccgattgtcggaagcggaaagcgcgagcggatttccgccgcgataaatgcgttgtcatacaagcttgaccaggatcaatggttccgcatttttacagccgtacagggttacgatattccataaaaagcatcagcttaccagctgatgctttttcaatattgtcacaccgcatagtgccaaattaccatttataagtgattgattctttcttgaaagcgttttatattaaaaggaaacctctctatatcctctactgcatctccttgcgacttcatccgcacatcaagattgtctaggaggtcttttttatgtatatgactgccagagaacaaaagctgttaaagcacttattattacaaaacagatatataaccgtaactgagcttgctgagctgatgcaagtcagcacgagaaccattcacagggaactcaaatcaattaaaccgctgatggaaaccgttgggcttacgttagataaacagcccggtaaaggtttgaaagcagtgggaagtcccgaagataaacaaaagctgcttactgatttatcatatgaacagcatgaatacagcgccgacgaacggaaactgctcattctttgttcgttattagagtctcaggagcccgtcaaactgtacacgcttgctcatgatctccaggtgacgaatgccacggtcagctatgacttagatgagctcgagaagtggatttctcccttcggactgacactgatccgcaaaagaggttttggcatccagcttatagggccggagaatgcgaaacggaaaattgtcggcaacttgattgtgaaccgtctcgacatccaaatgtttttggaagcggttgaattaaacatcaaaggaaaaaccgattcttcagagaaaatgttcggggttgtcagcaaaggtgagctgttaaaaatggagcgcatcttatttcagctcaaagaaaaaatcgctttttcattgtccgacagctcctatatagcgctcgtcgtccatctgacgtatgctatcgaacgaattaagcttggggaaactatcaccatggagcaaaatgagcttgaggaactgaagaatgcgaaggaatacagctccgctcttgaaatcgcgggcgagcttgaacgtgccttcggcgtgacgattccagaggcggaggtcggctatattacaatccaccttcgaagcgccaatcgaaaatacaaaacagaatacaaagcgcaggaaattgagctggaaacagccctgcaaacaaagcggctcattgcttttatttcagacaaaatcagaatggatctgacgaaaaactactctttatatgaaggcttgattgcccatttggagccggccgtcagccgcataaaagaaaatattgagatatacaatccgatgaaggaacagatcaagcgcgattattttctgctttatatggcgatcgaagaaggtgtcgaaaagtattttccgggcatgtccttttctgatgatgaaatcgcttttatcgttcttcactttggctcggctcttgaaatcaaaaaagaagaagcaaaagtgaaagcgcttgtcgtctgctcaagcgggatcggctcctcgaaaatgcttgcctccagactgaaaaaagagctgccggaaattgaatcgtttgatatgtcatccctgatcgagctaaaggggaaggatgttcaagcctatgatatgattgtgtccactgtaccgattccttatgaaaacattgattacatcatggtcagcccgctattaaatgaggaagacgcaaaccaggtcaagcagtatatcaagcggaagattccccttattcttaacaaaaaaagaagcccgaaggaagaggcgcagcaagctgatgtacctgacatgctagaggcggcggaaagcataggccggtatatggaagttatccaagatgttctgcgccattttacgctagctcaactcaaaacaaacccggaccatagcatgcttctgctagagctttttcaacagctgaagaaggatggcctgatccgtgatccggaaaaagccgcggtttgcctggctgagcgggagaaacaagggggattgggaatccccggaacaaacatggcgctttatcatctcaaaaatgatgaaatcgtcctgccttttttcaaaatgtttgatctcagcacctcctatgaagtggatggcatggacggaaataccctcaggatgacacgcattctcgtcatgatggcgcctagctcattatctgctgaaggctcggagattttaagcgcgatcagctcggcaattatcgagagcagagaaagcatggcggggtttcaggaagaaggagaacaagaattgtatcagcggttaaaccgcatatttttcacatggatgaaagaaaaaaacatactgtaaacctgcatggcacacgtcaaaaatttggcgtgtgtttttctgtggatggggaacaaaataagaaaatgtgggactattttatcattcagtattggaataattccaaaatgaaatagttttacaagttatcttttttgggttaaaatgggtgaggcaaggaagaaaatctaacaaattattgaagattcaagagaatataggagatgacgatatggaaacattacagcatctgattctgcatgacatgccgaatagcgaagaaatagaggctgtaaaaagcggagaccatacactgacatataaaggttaccgtaaacggattaatcagctggcgaatgccatgcttcaaaaaggaattcaaaagggcgaccgtgttgcattgctttgcaaaaacggccatcccgcatcaactgttatgttcgccgcgcttgaaataggtgctgttgtcgtacctgtcagctggcagctgaaaccatatgaaatgacaggcattttaaaagcaagtgaaccgaaagcgatgttttacggagcggagtttaaagagatactggatgaagttctacctgaattgtcctcactgtgtgtaacaatggaaacaggaacagcttacgaaacatctgctgaatttgaagcgctgtttgcaggtcctgatcatttgccagagacggaaatggtttcacctgatgatacagcacttctgatgtttacatctggaacaacgggaaacccgaaaagatgcatgattacacatggcggcatatacagatacgttaaaaaatccaacagctcaatagcacgtatgaagggccttcgttttctcgcgtgccatccgatttatcatacgagtgcgctcatttgcatcatgcttggaacgtttgcagaaacaacctttgtgtttacaaaggatcaagatcctgttcacatgctgaaggtcattgaagaagagaaaattcagaccgtgatggctcttcctgtgttttacacgtatttgcttgaggcgtgggaaacgcaccaaactgacttatcttcacttgttattttaatgacaggcggaacaaaagtgccgagcagcctaatccgccgctatcttgatattggcattccgctcgcgcatggctatggaagcactgaggcttggggcatcagcacatggacgcctgatatgggaatggataaagcggcatctgcaggaaaacctgtggcaggtgttaaagtcaaagtggaagatcctctgaccggagaagaacttcctcaaggagaaatcggcgaaatcgttgttcatactccattcttatttaaaggctatgaagacaatcctgaagcaacagcgaaagtgctgcaaaatggatggtttagaaccggagattcaggatatgtagatgaagatggctttattttcatcacgggacgctacaaggatgtcattatttacggaggcgataacgtctatcctgatcaggttgaagaagttatccagcagatcccgggaatccttgaaacggctgtggtcggtattccagacccgctttacggtgaaaaaccgaaagcttttatcgtgaaaaatggcggccagcgcatcacagaagaggatgtcatcgcattttgtaaagaacgcctgtccgcttacaaaatacctgaagttgaatttgttaacgaactgccgaaaaacaaccttggcaaggtgaaaaaagacgtcctgcgcaatcaggctgtacattcataaaagaagaagcccgtccactttatgtggcgggcttctttgcacttgcacagacggaaagctcaggcttaatgttcttaaattgtatatcaatgtcttcgaagccggctgctttaaagtcagcaatcatctgtcttccaaatgatttggttttttcaggactggcatccgcttcccgcggctgcatcgtaatggctgctttgccgcctggctttaatgcccgataaatctgtttcatgccttttgtttggtcattccaaatggtgtagttgttaacggaaatcactttatcataaaacgaggcggggagaggaaatgtctcgatgcttccttgtatcaggcgtacgccctttggtttcactctgcgggcggccagcttcagcatggcctctgacacatcaatcccatgaagatgaacatccttctcgcgtttcagcatctgctgcatgcagtatcccgggccaaacccgacttctaaaatgctgtccccgcgcgtgatacccagctgattgattgtccactgattcagtgtttgattttcagcagccatgatgtacccggcaatcatgccgatgacgccctttggcctgctgaatcttctagaaagcatgttaatcattcagcaaccaaccccctttttgagttaatttcctcccagcgttccatgtgaaacatttttctgataaagcaatgcgaaggtgccaagccatgtttatccatagagtgtgtgaggtacacaacaaatagacatgaaaacaaaggaggagaatcatcatggcaaattatccaaaagaactgccggcacaaactcaaagtcgccagccgggaattgaaagcgaaatgaatccaagtccggtgtatgagtacgaggattataaaggagcagacaaattaaaaggaaaagtagctcttattacaggcggcgacagcgggatcggacgcgcggtttccgtcgcttacgcaaaggaaggcgcagacatcgccattgtgtataaggatgagcatgaagacgctgagaagacgaagaaacgtgttgaacaagaaggcgtaaaatgcctgctgattgctggtgacgtaggtgaagaggaattctgcaatgaagcggttgaaaaaacggtcaaggaactaggcggccttgacatccttgtcaacaatgcaggtgaacagcatccgaaggaaagcatcaaagatattacgagcgaacagcttcaccgcacattcaaaacaaatttttattctcaattttatttgactaaaaaagcaattgattacctgaaaccgggcagcgccatcatcaatacgacatccatcaacccgtacgtagggaacccgacactgattgattatacagcgacaaaaggggcgatcaacgcctttacaagaacaatggcgcaggcgcttgttaaagacggcatccgtgtaaatgcagtcgcgccgggtccaatctggacgccactaatcccagctacgttccctgaagaaacagttgctcaatttgggcaggatacgccgatgggccgtcctggacagcctgttgagcacgtcggctgttatgtgctcctggcatcagatgagtcctcttacatgacaggacagaccctgcatgtcaacggcggaaactttgtgacgacataagagggagtgagacatatgagcatcacgaaagaagaagtgaacagctactatcaaaaagcagggattgtattaacggacgaggaagtagaccaaatccagctgatggattacggcttaggaaaagaaagaaaagtcgggctccagctcttcgtctacgtcaatacagaccgttattgttcaaaggaattggtgctgtttccgggacagacttgcccggaacaccgccatccgccggtcgacggccaggaaggcaagcaggagaccttccgctgccgctacggaaaagtgtatctttacgtagaaggagaaaaaacgccgcttccaaaagttctccctcctcaggaagacagagaacactatacggtctggcacgaaattgagctagaaccgggcgggcaatacacgattccaccaaacacaaagcattggttccaggccggggaagaaggtgccgtcgtgacggaaatgtcatcgacgagtacggataaacatgatatctttaccgatccaagaatataaggatgggcttaacagcccatcctttttgtattgaaaaaaacagaatcatcgctataatggttaaaaaaggaaagagggcgaggcaatgttcacttgcaaggtaaatgagcacatcaccatccgattattggagccgaaggatgcggagcggctggccgaactcattatccaaaatcagcagcggcttggcaagtggctgttttttgcggaaaatccaagcagcgctgacacgtaccgagaaacaatcattccagattggcggcgccagtatgccgacctgaacggcattgaggcgggtctcctttatgacggcagcttatgcggcatgatcagcctgcataaccttgatcaagtgaatcgtaaggcggaaatcggatattggattgccaaagaatttgaagggaaaggcattattacagctgcctgccgaaaactcattacgtatgcttttgaagagcttgagctgaatcgtgtggcgatctgtgcggctgtcggaaacgaaaaaagcagagcggttccggagcggctcgggtttctagaggaaggcagggcacgggacggcttatacgtaaacggcatgcatcacgacctcgtctactacagtctgttaaagcgtgaatgggaaggcgaaaaataaagagcacactttcttgtttaaatcttccccggatgtggaaaagtaacagcggagacgttaaaaaggagtgattcgagatgaatcagcaagacattaaacaaaaagtgcttgatgttctagatcaccataaagtaggttcgctcgcaacagttcaaaagggcaaaccgcattcccgctacatgacttttttccatgacgggctgacgatttacacaccgacaagcaaggaaactcataaagcagaagaaattgagaacaaccccaatgtccacattttattaggctatgattgtgaaggttttggcgacgcatatgtcgaagttgccggaaaagccaaaatcaacaattcggcagaactcaaggacaaaatatggagttccaaattagagcgctggtttgacggcaaggatgatccgaatctggtgattcttgaaattgaaccggaggatatcagattaatgaatgccggagagaaaacaccggtctcactcgaactataaaaaatttgtgttttcaggggcgatatgttattatgaatagctagtaagaaaaataagcaaataaaaaagaaagtaaacttcttttttctgttttgagagagaagcttaccgcttcccaagcagcataaccagctgcccttattcttttccttcataacaaatcgcccctaacgatgagatggaaaaaagacttttttgttttacaattcacaccggcgcggcttcggagccgcagtgacgattgagaggtagggctttcgttgtcttgtgttcaagaaatttccatggtgtttactttccagaatgattcttcggaacaatgctttatgaatctaacccgcctgacttggcggatgatataatctttatttgcgtatagaaaagaataagacaaaccgcccggcgtacgccggacggtttttttattgcaaaaaacacatcgtactgaaacctccttgtcttctttccagtcttatctctaggatgaaattggaggaagaataacgtgcatgtcattacaacacaagtactttttattttttgttttttattgctgattcactcgatagaaaccttagcctatgctacaaggctttccggggcccgcgttggatttattgcgtccgcgctttctctgtttaatgtcatggtcatcgtatccagaatgtcgaacatggtgcagcagccctttactgggcatttaattgatgctgctggaaaaaacgcactggcgattgtaggggagcagttccgctttttaattttcggatcgacagtcggcaccattttgggcattatcctgctcccgtcttttgtcgctcttttttcacgggcgattattcacttggcgggcggcggcggctccgtttttcaagtattccgaaagggattctcgaaacaaggattcaaaaatgccctttcctatttgcgtctgccgtccatttcatatgtaaaaggatttcatatgcgcttgattccgaagcgtttgtttgtcatcaacatgctgatcacatcgatttatacgattggcgtgctttcggctttatacgcaggccttctggcgccggagcgcagcacgacagccgtcatggcttcgggtttgatcaacggaattgcgacgatgctgctggccatttttgttgatcctaaagtatccgttctagctgatgatgtggcaaaaggaaaacgaagctatctctatttaaaatggacctctatcacaatggtcacatcaagggtggcgggcacactcctcgcccagctcatatttattccgggggcctactatatcgcgtggctgacaaagtggttttaataagaaaggctggatcataaagatccagccttttttgcattcccttatttatatttccttaatccgcggtcgtacaaaaaatttccgaatgggacgaaagcagcgacgaagccggcagctgaccatttcagcggccatttgacagagaaggttgcataagccaagacaagcaaatacaaaatgaacaacccgccgtgaaccgaaccgacaattgtcaccgcaagcggaaggcctgcccaatatttaagcggcatagcgatgaacaacaggattaagagtgacattccttcaataaaacccatcgtgcgaagtcttccgatcggcgtgtgcagcataaatcgccctccttgtggacacgttttcattttatactataaacaatccggaggggcatatgacagctttcaaaaaatgttcggaaaacattcatttttacatgccttttctagggaactgtacttgtcatttacaaaaatacccgagataatgtgtacaaaatcaaaaaagaaggatgttgaaatgaaacttgaccagattgatctgaatatcattgaggagctgaagaaggacagccgtttgtcgatgagggaattaggcagaaaaattaagctgtcgcctccatctgtgacagaacgggtaaggcagcttgaatcgtttggcatcatcaagcaatacacgctggaggtcgaccagaaaaaacttgggcttcccgtttcctgtattgtggaagcaaccgttaaaaacgcggattacgagcggttcaaaagctatattcaaacattgccgaatattgaattttgctaccggattgcaggtgcagcctgctatatgctgaaaatcaatgccgaaagcctcgaagcggtagaagatttcattaacaaaacatcgccctacgcgcaaaccgtcactcacgttattttctcagaaattgacacgaaaaacgggcgcggttagagagtgccgcgtgaagtctgttataataacaggatgagcgcgaaagaaagagaagtgatcaagcatgtcaaaaacagttgtattagctgaaaaaccttcagtcggccgggatttagcccgggtgctgaagtgccataaaaaaggaaacggttatctcgaaggcgatcaatatattgtgacctgggctttaggccatttggtgacgcttgctgatccggaaggctacggaaaagaatttcaatcatggcgcctagaggatctgccgattattccagaacccttgaagcttgtggtgataaaaaaaaccggaaagcagttcaatgcagtcaaatcccagcttacccgtaaagacgtcaatcagattgtcatcgcgactgacgcaggccgggaaggtgagcttgttgcgcgctggatcattgagaaagcgaatgtccgaaaaccaatcaagcggctgtggatttcatctgtgacggataaagcgatcaaggaaggttttcaaaagctgcgcagcggcaaagaatatgaaaacctgtaccattctgccgtcgccagagcggaagcggattggcttgtggggatcaacgccacccgtgcacttaccacaaaattcaatgcccagctctcatgcgggcgtgtgcagactccgacgcttgccatgattgcaaagcgcgaggcagacattcaggcgtttacgcccgttccgtattacggcatccgtgctgcagtcgacggcatgacgctgacgtggcaggataagaaatcaaagcagacgagaacgttcaatcaagatgtaacaagccgtttgctaaaaaatctccaaggaaagcaagcggtcgtagctgagctgaaaaaaacagcgaaaaaaagctttgcgcctgcgctttatgatttaacggagctgcagcgtgacgcccacaagcgcttcggtttttctgctaaagaaacgctttctgtactgcagaagctatatgagcagcataagctcgtcacatatccgcggacggactctagatttttatccagtgacatcgtcccgacgttaaaagaccgtctggaaggcatggaagtaaaaccgtatgcccaatatgtcagccaaattaaaaaacgcggcattaaatctcataaaggatatgtcaatgacgcgaaggtgtcagaccaccacgcgattatcccgaccgaagagccgctcgttctcagcagtctgagtgataaagaacgaaagctgtatgacctgattgcgaaacgtttcctggctgtattaatgcctgcattcgaatatgaggaaacaaaggtcatcgcagaaatcggcggagaaacctttacggcgaaaggcaaaaccgtgcagtcgcaagggtggaaagccgtttatgatatggcggatgaggatgatgagcaggaggatgacagagatcagacacttcctgcgcttcaaaaaggcgacacacttgccgtccgcacgttaacggaaacaagcggccaaacgaagccgcctgcccgctttaatgaaggaaccttgctgtcagcgatggaaaacccaagcgcgtttatgcagggagaagaaaaaggcctcgtcaaaacgcttggagaaacaggcggcctcggcacggtggcaacgcgtgccgacattattgaaaaactgttcaacagctttttaatcgagaaaaaaaaccaagatatttttatcacttctaaaggaaaacagctcctgcagcttgttccggaggatctgaaatcaccggccttaacagcagaatgggagcaaaagctgtctgcgatcgcggccggcaaattgaaatcggctgtttttattaaagatatgaaggcttacgctcaccaaacggtaaaagaaatcaaaaacagcagccaaaccttccgacatgacaacattacgggaacggcatgtccggaatgcggcaaaatgatgctgaaagtaaacggcaaacgcgggacgatgctcgtgtgccaagatcgtgaatgcggaagcagaaaaacgattgcccgaaaaacaaacgcacgctgcccgaactgccataaaagaatggagcttcgcggccaaggcgagggccaaacctttgcgtgtgtgtgcggtcaccgtgaaaagctctctgtatttgaaaaacgaaaaaacaaagacaaagcgcgtgctaccaaacgggacgtatcctcttatatgaaaaaacaaaataaagatgagccgattaacaacgcgctggcagaacagctgaaaaaactcggtttggataaataataaaaaaacctgtgcctatcgcacaggttttttattggacttaggtcctgttttcttaatgttcaaaaaggggaaaaaaagctagcaatctgcatttttttcttttatagtaaatgtactttgtaacatggcagtcatattttcgtctataactatttgtgagcgtctgatttgcttcaggcgacaaagggggatttgcctgtgaggcatgtactaattgctgtcatcttattcttcttatctatcggactttccgcagggtgtgctgaagctggaaacaagacccaaaatcagtcggcgacagaagtgaatgccagcccgctccagccggcggaatatttcatctatcacaatttaatgaatgacaaagggctgatcaaaaccgatttttcagaccagccttcttacttgtcggaatctctcggactgtggatggagtttctgctcagcaaaaatgacgcaccacatttccaggatcaatatcagcatctgactgattcatttctgatgagcaatcacttggtgacgtggaagattcaaaatggccaagcgagcgggacgaatgcgctgatagatgatatgagaattatgctgtctcttgaccaagccgccgcaaaatggggccgcagcgactacgcgcaaacggctagggatatcggcacgtctttgaagacatacaatatgaacaacgggttttttacagacttttacgactcacaggccgcttcaaaggatgtgacgctttcatacgtcatgcctgatgccttagctgtcttaaagaagaatggaatcatagacgaagaaacagaacagcggaatgccaatgttctctattcagctcctttaaaaaatggctttctgccgaagacatacagctcggagacgaaggaatacacatatgatagtgaaatcaacctgattgatcagctttacgctgcttggcatttgccggaaggggatgaaaaagcatctgttttagcggactggatcaagcaggaatttcagaaaaacggaaagctgtacgggcggtattcggcagatacgaaggagcctgccgtccaatatgagtctccatccgtatatgccttagccgtattgtttttgacaaaacagcatgaaaacagttctgtcatcaaagccatatatgacagaatgaatgactttgaaattcatgatccggtgaaatcgtattatggaggctatatgagcggcactcagacgcattcatttgacaatctgctgccgctgttagccgaaaggaagctttttaatgaaaatatcattcagtgaatcacaaaaattatttgcttatttttcagggctcatcgcggccctgtctttgtttatttattatgtgtcagcccagcaatcagaaggtgctctgatccttttcatcacatttggcgtcatcgccgcaggcatctggttcggcccgatttacgcgctggcagtgaccttaatcgtactctttgttctcggcaccttaatgatgtttttccagactggacagacatcgctctttccggctgaggaagggctgcgaatgcttgtcgtgtggggaatcgcgcttttgctgttttcttttatttctggaagaatccacgatattacagcagagcttcggcgctcaataacacggcttcaatccgaaatcaaaagctatgttgctgttgacagagtgactggttttgataacaagcaaaggatgaatctggaactttcagaagaaatcaagcgggcggagcgctacggcaattcttttgtgtttttgctgctccatatgcattatttcaaagagtttaagtctttgtacggtgaaaaagaaacggaccgcctcttccaatatgtcggtcagcaaatcaggacaagcgttcgggaaacggataagaaattccgtccctctgacgagcgtatcgggatcgtgctgacgcacacgcctgctgaacatatgccggccgttctgaccaagctgaagaaacaattggatacatatcagctggaaaatggaaagtatgtgtcgcttacgttccacgtttgctatttgccctaccgcaacgatatcaaaacagctgatcaatttttagaagaactggaaaacgagatgatgatgaatgaactataaaggaatcacattgctatgcgtcatgatgcttctttttttagctattgcgtcttttcccgtttctgcgcaagcgaaagatcaggatgccggcattctcatcatctactcaaccttggacggcaaagagtcgtcacaagtcaaaatgctcgatttgcttgcgggccactttacatcccatgtgacagtcaaaaaagattcagacgttgaagcgtcggatctcaaagggaaagaccatgtgatttattacggccaaacgaaaagaaagctcagcaaaaaattgctgtctcttatcagcggcgtaaaaaaaccggttgtcgccattggctataacgcaggccaaatcagccaattttccggtctttcattagcccgcaaagaaaatgtgtttcaggttcacagcaggtcggaaaaggccgatgtgtctctggaaagcgggcttaacgtgctgagtgtatcaggcctgaaaggaacggcgctttacaccttcaaagccgatgacggcacaacgcattcttttatatggaaaacaaaaaaagggaatgtgtacattggattaacaaatttgttaaatgacaatttgatcgtggcgaaacagctcagagaagctttcggagagaaggcggggacgacgttattgtatttgcgtctcgaggatatcagcccgatgtctgatgaaaaattgctgcttcaagccggtacatacctgcataagcggcatattccttttatcctggcggtcattccggtttatttgaatccggaaacaggcgacaaagtgtatttgtctgatcaaccgaagatggtcaaggtgctgaagaagctgcaaagcatgggcggcagtatcattgttcacggctatactcacgcttatcgctacagtgaaacaggagagggctttgaattttgggatgcaaaggcggatcagccgattacatccggaaatgccgaagaccccccgtccattttggagaaagaacaggacttcccgaacgaacaagcctatcacagctatctcgaaccatttcgggaaaaggaagaaacgtatacaaaacaaaaactgacgcgtgccattgaggatttgacatcatcgggtctttacccgctggcgtttgaagcgccgcattacacgatgtccgaatatggctatcaaatcgcctcgcagtattttacaagcattttcggccaggtccagctcagcagcacaacatggaaaacatccggtgcacctccgtttgtgactgctccttcgatgttgcacggaatgacgctttatccggaaacgatcggctttgtcgacacatcgaagcaaaactcgctcggtgagatggaggagcacatctcccagatgattgattttgaaggcggagtagccggaggattttatcacccgtacctcgggatgaaatatctgccggagctggttgatcagatggaacgcattccagacagtgaatggcttgatttaaagaaaacgaaacaaaccgtcaaaacagacaaagtggaaattcatacaagcggtgacggaacgattcaggtgaaaaacggcgtaagcgcgattgacgagtttttcgatcatcaccggcaaacccctctggaaaaggcgttatggattctctccgctgttgtgctcttatttgtcatcatgtttgtcagttatacgttttacttgagagccacattgaaaaaacgaatttttaaggagagaagaagccttgggtaatacgctgttctttatctcgctaagtttaatatgggttatgcttctctaccacatgttcctcatgcagggcgggtttcgccactatatgaccttcgaacggaatatcccgaagtggagagaaaatatgaaggaactgccgaaggtcagcgtcctcatcccggcgcataacgaagaggttgtgattcggcagacgctgaaggccatggtcaacctttattatccgaaggaccggctggagattatcgtcgttaatgataattcatcagaccggacgggtgatatcgtcaatgaattttccgagaaatacgatttcatcaaaatggtgattacgaagccgccaaatgcaggaaaaggaaaatcctctgcacttaactcgggttttgccgaatcgaacggcgatgtgatctgtgtgtatgacgccgacaacacgcctgagaaaatggctgtgtattaccttgtgctcggcctgatgaatgacgaaaaggcaggcgccgtggtagggaaattccgtgtcatcaatgcggcaaagacgctgctgacgaggtttattaatatcgaaacgatctgttttcagtggatggcccagggaggcagatggaagtggttcaaaatcgccacgatcccaggcaccaacttcgcgatccgcagaagcattatcgaaaagctcggaggctgggatgacaaagcgctcgctgaggatactgagctgaccatccgggtatataatctcggctatcacatccgctttttccctgccgccatcacgtgggagcaggaaccggaaacatggaaggtatggtggcgccagcgcacccgatgggcgcgcggcaatcaatatgtcgtgctcaaatttttggcgcagttttttaagctgaaacgaaaacaaattatctttgatttgttttattttttctttacgtacttcctgtttttctttggcgtgatcatgtcaaatgcgatttttgtagtgaatttgttttatgatttgcatttgtctgttggatttttggcaatgattctctggattttggcgtttttcttatttatgacagaggtcatgattacgttgagcattgaaaaaacagaaatgaacaagcaaaacttttttatcgtatttctcatgtacttcacatactcgcaggcatggattgtgcttgttatctactctttattcgtagaaatcaagcaccgtttattcaagcaagaggtcaaatggtacaagacagaacgatacaatcaacataaaagcgggtgacctttttgaaacaaataatgatttttctcacaagcttcatgctgctggcgatgactggacaaacggctcttgccaaagacgtacaggtcagcggttcgctcctcgggaaaagcagccaagaacaagccaaacagcaggtgctgacaagcgagttgattacactgtatggatcaaaagacagcgcagagctgacgtaccagatcccggcaggcgcctcttcgggcaatcagcaattggtaatcgaatacgaggcatcaaatcttttaatttctccatcatcgttaacggctgtcattgatgatgaaccggtcaagacgttaaagcttgatggtgattccaaacggaaaacagtgaagctgaatctgaataaaagccagtctgcgcaaggctatcacaacgtatcgctgaaattctacggcgtaatgaaagagggcgtgtgcgtcagacaggatacatcaggcaactggatcaaaatttatccggacagccggctgacacttgctgacagcagtgaagcgaagggaacgtcgctggaccattatccgtatcctttcgcccaatctggaaatacagcggaagaaacagctatcgtcattccggataacccaagttcagcagaaatagaagctgctgttaaaacagaaggctatttgaaaacggtggacagcagtgtcagtattgcgtatgtcacggaatctgaactgaaaaaaatcgataagccgacgattgttatcggcgtggacaagcattggaacggcaaagtgaaaaaactgttgaaacaagctgggctacaggcaaaaggagaaaaccttctgcttgcggagcgggtgctgaaagcagagggcaaacagcagccggttctgtttgcgcaagcggcgtccgaggacgcgctcactaaaaaaatcagcgtgatgacagatcagacatatacaggccagctcagcggcgatacactttcaatcagcaagcttcagcagactgaaaaaaaagaaagcgataagctgacccttgagaattttggagcgggtgatatcacaattggagccgacaaaacatcttcagcacattatttttatccggcttcggctgttttagatgaaaaccaatcggcgaagctgtcgcttaaactgaaaaagtctgaaacgattcaagcctcagcgactgaaaacgagtctgcctctcaggccgcagaactgaaagtgatgatcaacggccagccgcactcggtccgacttgatgaattaggaaaagaagataaaaacggattctatcatgtcacagtgaaagtggaccctaaactgctgcaaaaaaaccgctacattgatattcagttcgtcacgaccggcttaaaggaaaacaacccttgcaacaccactgatgaggaaaagtgggtttttatcgataaaaacagtacattatcatacgccatcaaaggcatgtctccgtcagcggattttcaagagtggccgcttccttacgccggaaaccaggatcaaacaacattaatcgtgcttcctgacaccgtaagccaatcgaagcttgaggagctttctctcgtaacggaatcctttggcagcgaagcacagcattcatatacagtaaagaaatcatctgacgttacagcaaaggatgcgaaaggacgaaacctcattttcataggagggatcaatcaattttctcttctgaaggagaaatcatcagatctgcttgtgccgcaggagaagaacggctcgtttgatgtatctggtttcgagatgctgaatgagacgacaaaacaagtggtatttacccaagcatcggtttgggattcacgctatacaatggcagtctttgcaccgtcaaaaggagatggaacggctgtcacaaaagagatcatcagttatctgaacagcaacgatgagtcggcaaccgtccttaatgaaacaaacagccagcaggtgtttacaaaccaccagcagctcaaatcggaaacaaacagttccgatgcagaacaaccaacacaggatcatagccagaaatggatgtatattggtgtgctggcactcattatggtggttgcggcagtgttcatttggattgccgtaagacgcagaaaaagaaagacagatacagaataaaacagaggctattttagcctctgtttttttatttttggtaagtaaattccatttgtggaacctgtcattttatttttttctctcagccaataagcctctttacaacgtgcgggaacgggagtatgatctcttttagaaaacaaatcgcttaatctgaaatcagagcgggggacccaatagaacggctttttgccgttggggtgaatcctttttaggtagggctaactctcatatgcccgaatccgtcagctaacctcgtaagcgttcgtgagaggagatgaatgaaacctgtgttcgatgttatggcacaggggcatccgtttgcctctgtgttttttgttgttcatttttgaatgcaaatcgcatacagagacatcatagcagaaaggactatcatcaacatgtgagagcaagacactgatggatgttttattgttttaattgaaaaatgagaaattaaaaggggaagacatcgatgtatcattcaatcaaacgttttttgattgggaaaccactaaaatcccaagcagctggagagcaaaaactgacgaaattaaaagccttggctatgctttcctcagatgcgctatcatctgtcgcatatgggacagaacaaattctaatcattttggcaacaatcagtgctgccgcattttggtactccattccgattgcggtgggcgttctcatcttgctgctcgcactgattctttcatacaggcaaattatttacgcttatccgcagggcggcggggcgtatatcgtttctaaagaaaatctcggtgaaaaaccgggattgattgcgggcggttcattgcttgttgattatattttaacagtagcggtaagtatttccgcaggcacggacgccatcacgtcagcctttcctgtattgcatgattatcatgtgccgatcgctatttttctcgtgttagtgattatgattttgaacctgcgcgggctttcggaatcggcatccattcttgcctaccctgtttatctgtttgtggtggcgcttttggttctcattgcagtcgggttgtttaaacttatgacaggacaaatagaccagccagcccatcatacaccgctcggcacacctgtagccggcattacgctgtttttgctgcttaaggctttttcctccggctgctcagcgttgaccggggttgaggccatttctaatgcgattcctgcattcaaaaacccgcctgcgcgaaacgcggcaagaacgcttgcgatgatggggattttgctggcgattctgttttccggcatcacggtgctcgcgtacgggtatggtacggcgccgaagcctgatgaaacagtggtttcacaaattgcgtccgaaaccttcgggcggaatgtgttctactatgtcatccaaggtgtcacatcgcttattttggttcttgcggcaaatacgggattttcagccttcccgcagcttgccttcaacctggcgagagaccagtatatgccgcgaatgtttacagtcaggggcgaccgcctaggcttctcaaatgggattatctttttaggcgttgcttccattgtgctcatcctgttattcgggggacagacagagcacttaattccgttatatgctgtcggcgtatttattccatttacgctttcgcaaaccggcatgtgcatcaaatggatcaagcaaaaaccaaagggctggatcggaaaaatgctgatcaactcttgcggcgctttgatttcgtttatggttctgtcgatcctgtttgtgacgaagtttaatgttgtatggcctgttttaatctttatgcctatcgtcgttctgttgttttttgcgattaaaaatcactacaccgctgtcggcgaacagcttcgcatcgtagacaaagagccggaagaaatcaaaggcaccgttgtgattgtgcctgtggccggtgtcaccaccgtcgtacaaaaatcgattcactatgcgaaatcactgtccgatcaggtgatcgccgttcacgtgtcatttgacagagaacaggaaaagaaattcgaaaaacgctgggaagagcttaataacggcgtgcgtctcgttacgcttcactcctcgtatagaagccttgtccatccgtttgataagtttttggaaacagttgaggcgaaagcgaagaaggagcagttttccgttatggtgctgtttccgcaatttataacgaaaaaacgctggcacaccatccttcacaaccaatcagccttcctcctcagagtccggctgttctggaaaaaggacataatggttgccacactgccgtatcattttaaaaagtaaagctctaggaccaagggaatcaccttggtccttttttgcggaaaaaggaggtatggcggtgtatacacaaggtgcttttgtgatcgtactgaacgaaagtcagcaggttctgctggtgaaacgaaaagatgtccctttatgggatttgccgggcggcagggttgatcccggggaatcggctgaggaagcggcagtgcgggaggtattggaagaaacgggatacaatgcagcgctttctgcgaaaataggtgtttaccaaaggccaaagtttcaagatgaacagcatctgtttttcggaagcataacaggcggacaagcagtggctgacggcacagagacagcgggattaaagtgggtttccccggagcgtttgccgctttttatggtgccgaaccgaaaaaggcagatcaatgatttcaagaatggcgctcaagatgtaaatgtcaccgtcaaggatagagggttgctcgcggcgatcgacctgttgaaaagaagactgggcaagtgattcaggtctccgggttttaaagcctttctcctgtggtattgaaaaaaggaaaaaggaggatacgttatggcacacaaaactgcaggacaagcaatgacagagctgcttgagcaatggggagttgatcatgtatacggcatccccggagacagtataaatgagtttattgaagaattaagacacgaaagaaatcaactgaagttcattcaaactcgccacgaagaggtagcggcactggcagccgcagctgaagcaaaactcaccggcaagatcggagtctgtctgtcaatcgcagggccgggagcggtgcacttattaaatggtttatatgatgcaaaagcggacggcgcccctgtgctggcgattgcaggacaggtttcttctggcgaagtcggacgggactatttccaggagattaagctggagcaaatgtttgaggacgtggctgtgttcaacagagaggtacatagcgcagaatcacttccggatctcttaaatcaggcgatcaggaccgcctacagcaaaaaaggcgttgcggtattgagcgtgtcagatgatttgtttgcggagaaaatcaaacgggagcccgtgtatacttcaccggtgtatattgaagggaaccttgaaccgaaaaaagaacagctcgtcacctgcgcccaatatattaataacgctaagaagccgattatcctggcagggcagggaatgaaaaaggcgaaacgggagctcttagaatttgcggacaaagccgccgctccgatcgttgttacactcccggcaaagggtgttgttcccgataagcacccgcattttctcggcaacctcggtcagatcggaacaaagccggcttacgaggcaatggaggaatgtgatttattaatcatgctcggaacgtcattcccgtaccgtgattatttgccagatgacacgccggcgatacagctcgattcagacccggcaaaaatcgggccttgtctgcgattcggctctcggtctgcgcgaattgacagagtatattgaacgcaaggaagacagaagattcctaaatgcctgcacagaacatatgcagcattggtggaacgaaattgaaaaagatgagacagaggccacaacaccgcttaaacctcagcaggtcgtggcccgtcttcaggaagcggcagccgatgatgcggtgctctctgtcgatgtcggcactgtgacagtctggatggcgcgtcatttcaaaatgaacgcgaatcaggatttcatcgtctccagctggcttgcgacaatgggttgcggcctgccgggagcgatcgccgcaagcttgtccgaaccggaacgccaggcgatcgctgtctgtggtgacgggggattttccatggtcatgcaggatcttccgaccgctgtcaaatataagctcccgatcacagtcgtcattttaaacaacgaaaatcttggcatgattgagtacgagcagcaggtcaaaggcaatatcgactatgtcacaaaacttcaaaatgtcgactatgccgcatttgcagaaagctgcggagcaaagggcatcaaagtgactaaagcgggagagcttgcgccggcattccatgaggcgctgcaatctgaccaaccggtcgtagtggatgtcatgattggaaacgaaccgccgcttcctggcaaaatcacctacgggcaggcgaaaggctttagcaagtacatgctgaaaaacttcttcgaaaaccaaaaatttgaaatgccgtcactgaagaaaagtttgaaacggttattttagaggcccttttagaggcctctttttttgtgttggaaacaaatgtatttcaggttatccttgtattatattggtatgaggaggattacatgtttgagttcataaaattattgttgtatgtattaggatctgcaggaatgatctatgcgtcatatcacgattttcgccatgctcagaacgggcaaaaggacaaatgcatcttctttcaaagcaaaaagaccagcgcatttgtccttgtatgtttcatttgtttattcttatcaaatctaacagagctcttctcagtatagggttatttctcttttttcttcagcccgaagaagaaaggaaaagcagaaccgaccaagaaggtgccgaataaaaacatgccgccgataaacacgtggaaatttgtgtgtccggccgtaaacgccgtgattagggaaataatactgagcacgatcatggcaatgccgggcgcgactctcatttttcccttggatttatgggcagcaacagaacataaaatgccgataacaataggaacaatccacaaataaaacagaataaatactgacatcatcaaaactccgatttttcttctatcataacaaatttctgtcaaaaagggtatcaaagagcttttgcgaaaaaataaaaaccggctttagaagccggtttttttatcgaaacgtatctacaattaaaaacacattcaaagcaacgatcaatacagcaatcagccaagacaccactgtgacccatttggcgttgatcagagatcccatgatccgtttattgcttgtaaacataataagcggaatgagggcaaaggcgatcccgaaggacagcacgacctggctcagtacgagagcggtcgtcggattaacacctgacgcgatgatcaagatcggcggaatgatcgtgataaaacgccgtacatacagcggaatgcggtagttgataaatccttgcataatcacgtcgcctgaaagtgtgccgacagacgaactggatagaccggcaacgagcagcccgatcccgaataaagccgcagacatagggctgacaagatgtccgaattgctgaaatgcgacgtcgagatcctcaacaaacaggccgtttttgaagaataatgcggcagccacaatcagcatacttgcattaatagcccctgcaatcagcatcgctattaaaatatcaataaattcaaacctaaagatttttttccgttctgcatcagttttgccaaccacccgccgctgtgtaagggcagagtgtaaataaatggcgtgcggcataacagttgcgccaagaatacccgctgcaagaagcacactgtcggtgccatgaaacgccgggacaaaaaggcccttcatcactgacacggcatcaggctttgcgaaaaaggtctgcagcgcaaaggcgatcacgaccacaaacagcatgccggcaataccggcttcaagtgagcgataaccgcggcgctgaagctccaatatcgcgaaagaaccgatcgccgcaataatagacgcttcaagcatcggaatgccgaacagcaaatacagtcccagagccgctccgataaattccgccaggtcagttgcgataatgacaagctcgccctgaatccataatccgatcgagacaggcttcgggaattcttcacgggcaacctcaggcagatttttgcctgtcgcaataccgagtttggcggatagggattgaattaaaagggccatgatattagaaaataagatcacccataagagcatatatccgtatttagaacccgccgaaatattcgttgcgaagttgccgggatcaatataggcaatggctgctataaatgcagggccgagaaaagggagcagccctctgaatcctctgattttcccgtcaagcgcatcttggacggctttggaacggggagattgtgctgtgatgtccttgttcatcatgtctcacctgaattctgtttgtttttgccgtacaacaaagagtttccttaaggcaaattattttatctacatcatatgaccatcccggtttcttgtcaaccgaaaatgttcaaaatacacttctgaatttttccctgttatgtaacatgatatgtaggaattcgggataaggtcccatataaaaagacatcgtttcagttcgaaacgatgcctcctgtatctaatgagtctaggcttccttccgcagcccgcggaatataaggcccagcaagaacacgaagatggctgccccgatgatggccgggaaaatagcaaagccggcgaggctcggtccccatgtgccaagaagtccgtgcccaatccaagcgccgatcagcccggcaatcatagagccgaaaattcctcccggcagccggtttcctacaatggcgctcccaattaatccgataacaattgcaacaactaatgaaaccaaaaagctaagcatcatgatcacctctcataaatgatttaccaatcaataaccgctcctgatcatttcgaaacacttaaaagcatattcctttatgatcctgttttaatctttctctgcacactgccgtcagctaaatgaacaatgacctcagtgcctttatgcgccgcgatttcctttgcccgttcaatcgcttctttctttgtatctttgatttcagacacacgtttggcgccctcggctttgactgcccagccttttttatgcttaataacatgctctgctttattcatgagctcggggccgctgccgctgcttggatcagcatcgcgttctgtctcatcatcatgcgtcaggaaatcatcaatttcatctgtagaggcgttttccgcccattccttcgctttgcttgtcgcaattggaatcgcgcgcccttcctcatagccttcatcaatcatcgcattcgcaatgtctatcgccttttttctcaccggcttctcaagattttttaatgaagcaggataatccttcatcgaccaaggcatgtccatcactccttttccttttataaaaatggtacccgcaggtgaaaaataaaaacgcatccgaaaaaatgaaggtatactatatagtagaaaaaacggaagggaagtgcggattgggtgccaacagaacgaaaagaagacttacatcagcaattaaaagagatagagaaatgggaaaaagatcagcaaaaagtctggttttgggaaaagctcagccgtctcccgtttcaactcctggacaagctgacaccagaattcatccagaaaaagatcggcaagctcttggatgaggtcggcagctttgttcaaacaggcggacagtacctgacatctgaaaaacagattatcaggatatttcaaaagaaactgccggaggagatctttgaatcgctggaggacatccggaaggcgcctctttctgtcatggatgaaattgcggaaggaatgggcaaaaatagaaccaacgcagcaaccgttcaaggcgcgacaaccggtgtgggcggcgtgtttacgctggcggcagacattccggcagtgcttggcttatcactaaaaacattacaggatatcgcagtcgcatacggctatgacccaaaggagaaaaaagaacgagtcttcattgtgaaatgcctgcagcttacgtcggctgatgttgtcggcaaaagatcgattttgcaggaattaaaacactacgatcaagaccgtacatataagaatgtcgcttctcaaatccaaggctggcgagaagtcgttttgggctatcgagacacgtttggctggaaaaaacttttccagatggtgccggttgccggaatggtttttggcgccgctgccaatcgctcaacattaaacgacattaccgagacaggcatgatgctgtacaaaaagaggcgcattcttgaacgactgaaagaaacagaacgagagatggaatagcagaaagcagacggacaccgcgatccgcctgctttttttagtggaaacatacccaatgtgttttgtttgtttaaaagaattgtgagcgggaatacaacaaccaacaccaattaaaggaggaattcaaaatggcagacaataacaaaatgagcagagaagaagcaggtagaaaaggcggagaaacaacaagcaagaaccatgacaaagaattctatcaagagattggtcaaaaaggcggagaagccaccagcaaaaaccatgacaaagaattctatcaggaaatcggcgaaaaaggcggagaagccactagcaagaaccatgacaaagagttctatcaagaaatcggtgaaaaaggcggagaagccactagcgaaaatcatgacaaagaattctatcaagaaatcggccgaaaaggcggagaggcaacaagcaaaaatcatgataaagaattctaccaagaaattggctcaaaaggcggaaacgcccgcaacaacgactaatcaaaaacataaaggcagacaacctgtaaataaaaaagcgatccggcacatcagctggatcgcttttttttggaatcttctcaatttatgccactattgcgatacaataagtgaaaaaggggttttcgctaatgtccaagatgcaaaacttgctcgccatcgcaaatgaagtcaaagaaaagcacgccaatttttcaatctcagaggtcaacgaccactgcgtgcgccttgcggtgtttacgggagaatatgactggcaccatcaccctgactcagacgaattgtttattgttcttgaaggggagctgctgatcgattttaaggacaaagaaaccgcggtgctcaaagcaaatgacagcctgctgatcccgaaaggcacggttcaccgcacacgctcttacgtcagaacggtaaatctctgtgtggagcataaacaagccgaaaccgtcatcatagaggagcagccatgctaatcaaaaagatgatatgtgaagtagacgctgcaaacgctgaagcatttgcaaaagcgcagtcacagtgggaagcattatcgcatataagcggctttatcaaacaggccggcggctggcgaaaaacgatagacgagccgctcaccgcagaaatcatcagtgtatgggaaaacagagaagcctatgatcattttatggagaacgaacatgacagcatatacgaggaaaacgatcagaaggctgtaattctttcgatagaggtgacggtgtacgaagaggataaaccgttcgtttatgatctgttacataaccccgatatccggtacgaaccaaactggacggttctgaaggcataatcaaagcccaaaacatcatattttgggcttgtctctttactcgcgtcccggaagtgtattatgaacaaaaggcggtgctggttttaactccggtttttctccaaacgtttttgcttctttcacatattcaaaggcttctccgtccggcgctttttcattcagccagttttgctcggcgctttcttcgccttcagagaaattgataagctgatgtgagaactcttgtttttcgagcgctttcgggaatgtacccggcacaaccggaccttcctgtgcttctaattctttaatggcggcaagccattggttctggtgcattgtgtcacgcgccagcaggaagctgagcatatctttgacgcctttgtcatccgtcatttcaaacaggcgtgcgacctgcagacggccctgtgattctgcattcaggttggcgcggaagtctgccagcaggtttccgcttgctacgatataaccgccgctccaaggtacgcctgtactgctttccggcatggcgccaagtcctgatacaatcgcatggtgagggttcatgccgcctaggatggagccgatgaccggatcttcagcagctttttcctgctgatcaagaggggcattctcaagaagtctggcaatcatcgttgcgatcatttcaacatgcccgagctcctcagttgccgtatccatcagcaagtccttgtatttttcatttcctcttgtgttccagccttgaaataagtactgcatggcaactgaaatttctccgaattgcccgcctaaaatttcttgcatttttttagcgaataatggatctggacgatctggtttagcaggatgctgcagcatttttgtgtgcttaaacatgtacccatctcctttttcgattatctctttttatatttccgatcgatagaaagataaacgaaaaacagcgtatcgagatgggaactatgaatcttttcgcagctccaacagttcccggatcagctcccggccgaagatgggctcatactgccggtaaacagggtcaagacgcttcatccattcttgtttctctttatctgacagctcataaatatgtatagcagaattctttttgatttcttccagctgctccttgttcatttgttcggcatacgtttcattccactccgtcgtctccttcatcgcttcagtcaaaatgcgccttgtttctggtgtttgcgccttccagaagtgttcatcagtcatgacagcgtagccgagataaccgtggctgcttattgtcaaatagtcctgaacattataaaattttttagaatagatgtttgaaattgtattttcttcgccatcgactacattgttttctaacagctgaaaggtagaattgaaggattcctgatgaggtgttgcaccaagcagcttgaactgatcctcaatcacatcgctttgcataatgcgcagatgctgcccttttaaatcatccggtgttttgaccggcccttgatttgttgtgatttgcttaaagccgttcgtccaataggccagtccttttaattggtttttctttagagaatcaaacagctgtgtgccgatgcttccgttcagcccttttttggcggcgttgtaatctgtaaaagcatacggcagatcaagcactccccattcaggcgagagcatgccgagcttcgatgtggagggggcgataaattgaacatcgccgttttgcaatgcttcaatttcttcaatgtccgagtacaggcttccattgggaaatacttctatttttattttcccgcctgatttttcgttcaccagatcagcgaatttattggcggcaagcccttttggcgtattttcagcaaccacgtggctgaatttaaacacgatttgatcctgcaggccttcctggtcgtcatcataaacaatctttttattgcctgtatgatcatggaatccgataaataaagcggttgcaattccagcgatcatcagtgcgagacatgcaagcaaactcttcatgaaaagccctcccctatgttaaggataatgggggcaatgacattcgtaaagacctgaaaggagaagctgatgaacaaaaagaagctctcaatccgttggaaaatcacgatcttatcctatatactcgtcattttctcctttttgatcggcggcattgtgctcatcggcaacattcagcatacagaggagcgggagctgaaaaagcggctgatgaatacggcccggacggtgtcagagatgacagaagtgaaagaagccttggcgcgaaaaaaacaaacagaagctgttcgccatgcggttgaagaaatcaggatgattaatgaagcagactatattgtcgtcatggatatgaatcacatccgatatacgcatcctgtcagcacaagcatcggcaagaaatcagaaggtgcagacgaggaggcagcgtttgcggagcacatttatttctctgaagcaaagggcgagctcggcacggcggttcgcgctttttatccggttaaggatcaagacctgaaccaaataggcgtggtgcttgtcggaaaaacgctgccagggatcgctgacatcctgcttcatttaaagcgtgatatcgccttcatcgttgtgctgacactcggctttggccttgctggttcctttttgctggcccgccatatcaaaaaacaaatgtttcagcttgaaccccatgagattgtccgaatgtatgaagaacggacagcgacgtttcactcgatgaatgaaggggtgatcgctattgacaatcggctcgtcattacgatttttaatgaaaaagcgaaacagatctttgaagtgcagggggatctgatcggcaaggtgatttgggaggttctcaaggattcgcgcctgcctgaaatcgtggagcggaacaaagcggtttataatgaagaaattcgtgtcagcggaaaagtcatcatgagcagcagaattccgatcgtcatgaagaaaaaagtgatcggcgccgttgcgatttttcaggacagaacggaagcggccaagatggcagaggaattgactggtgtcagaaactttgtggaggcgctccgtgtccaaaaccatgagcatatgaataagctgcacacgatcgccggcctcatccagctggggaaatctgaaaaagccttgcagcttgcattccaggcgtcaactgagcaggaaaatgtgactgaatttctgcaccgctcgattcaaaatgacgctgcggcaggccttctattaagtaaaatcagaaggggaagagagctcggcattgctgttcatatagatgaaaacagcagtcttcagcaatttcccgagcatgttgatcagcatgatattgtcgtgcttttggggaatctgattgaaaatgccttcggctcatttgaaaccgttcaatctgaagacaaacgaattgacattagtatcgaacaaacagatgatatccttgctattttaatagaagataacggctgcggaattgatccggcacatatgcctcgcctttacgacaaaggttttacggtcaataaaactggcggcacaggctatggcctgtatctagtgaaacaaatcatagacaaaggatcgggcacgatagaagttgattcacatgcggggcaggggacatctttttctatcgtttttccaatgaagggggaggaagcacagcatggctcgtaaagaatggaaggttctgctcattgaagacgatccgatggttcaagaggtcaataaggatttcattacaactgttaaaggcgttactgtctgtgcaacggcaggaaacggagaggaaggcatgaagctgatcaaagaagaacagccggatctcgtcattctcgatgtgtacatgccgaaaaaagacggcatcaagaccttgcaggagatcagaaagcaaaagcttgaagtggatgtcattgtcgtctccgctgcaaaagacaaggaaacgatctcactcatgctgcaaaacggggcgattgactatatcttaaagccgtttaagcttgagcgaatgagacaggcgctcgaaaagtacaagcaatataaacaaaaaatcgaagcgaatgatacgctgtcccaggaacagctcgatgcgatcctgaatattccgcagcaggccgtacaggatctgccgaaagggttgaatcacttcacgatgaatgaagtcactgcttttttgaaacagcaaaccgcatccctttctgctgaagaggtcgccaaggcgcttggcatcgccagagtgacagccagacgatatcttgattacttagaaaaaaccgggatcatcaaattggacgttcaatacggcggagtcggccggccggtcaaccgctacgtgttaaaaggataaacctgagaccaaaaagaccaaaatgtccgttatgatcataaacttccccagacattatgaaaacgctatcattatagtaagaaagacacaaaaggcgaataggacagggggatgaaggatatgaaactgtttaaaaatttaacagttcaggtcataaccgcggtcatcatcggggtcattgtcgggctggtctggccggatgtcggcaaagaaatgaaaccgcttggcgatacatttatcaacgctgttaaaatggtgattgcaccaattattttcttcacaatcgttctcgggattgcaaaaatgggcgatatgaagaaggttggaaaagtagggggaaaagcgtttatctatttcgaggttgtcaccaccctcgcactcattatcggtttatttgtcgtcaatattatgaagccgggtgcgggtcttgattacagcaagcttgaaaagggtgatgtatcacaatacacgcaaaatggcggtcagggaatcgactggattgaatttgttacacacattgttccatccaacatggttgatgccttcgcaaaaggggacattttgcaggtcttattcttttctattcttttcggagtgggtcttgcggcattaggcgaaaaaggaaaaagcgtcattgatttcttcgacaaggtttctcacgtttttttcaaaattatcggctacattatgcgtgccgcgccaatcggggcattcggggcgatggcgtatacaatcggacacttcgggctcgattccatcaaaccgctggcaagcttaatgatgtctgtttatattacgatgttcctgttcgtatttgttgctttaaatatcatctgcaagctttacggattcagcctgtggaattaccttcgcttcattaaggatgagcttctgatcgtgcttggcacaagctcttccgaatcggtgcttcctcgtatgatggataaaatggagcgctacggctgttccaaatccgttgtcgggctagttattccgacgggctattcgtttaacctcgacggcacatccatctatttatcaatggcgactgtctttttggcacaggtgtttggggtagacctcagcatcggccagcaaattacgattatcctcgttctgatgctgacatcgaagggagcggcaggtgtgacgggaagcggatttatcgtccttgcctcaacgctgtcagcgctgcaggtcatcccgctggagggtcttgcactcctgctaggggttgaccgattcatgagtgaaggaagagccattgtgaacctgatcggaaacggaatcgccacgatcattgttgccaaaagcgaaaatgaatttgatgaagcaaaaagcgtagaggctgtggaaggcatgaaaaaaatgaaaacagcagtctgaaaaaagaacggcccatccatggggccgtttttttaattgtttaagaattattaaggtaaggacagagacctcagcatttttttgttatataatttacaaatggatactatattgaatgaaggacgtttgtcctaacaggagtgtataaatggccgctttagttaaattttttcagcacccgggagtaaggcgtttctccatctttgtcgtgttaactggtgtgttatatctatttaagagcatgatcaacttaatattgcttaccttcattttcacatttctaatggatcgtttggagcttgtcgtgcggcagtttgtaagccagttcttccgcgtgagccagcgggttgtcattacgtttctttacatgttgctggctgtgctgcttacagtcgggggctttgtgttttatccggtcgtcgcggcacagatccagcagctggtaaagcagattaaacatattgcgtatcatcctgacagcatccctttctttgatgagatcaccagtgtcttcggagatattaacatcagttcatatgtcaaagagggcttcaatgtagtgtatacgtatctggccgatatcagcacattcggcttgcaggtcgtgatggcgctcattctcagcatgtttttcttatttgagaaaaaacggctttctgaattcatggcgaaatttaaaacgagcaaactgagggtcttttatgaggagattgcttttttcggaagcaaatttgcaagaacgttcggcaaggtgctcgaggctcaatttatcattgcgctcgtcaactgtattctgacgtttatcgcgctttggattatgcattttccgcagctgtttgggctgtcgattatggtgttcttccttggattgatccctgtagcaggcgtcgtcatttccctgattccgctcagcattatcgcctacagcactggcggtggaatgtatgtgctctacattgttcttgtcatattcgccattcatgcgatcgaaacctatttcttaaatccgaagctgatgtcggcgaaaacagagttgccaatctttttcaccttcacagtactcattttctctgaacacttcttcggcatttggggtttaattatcgggattccgatctttgtgtttctccttgatattctggatgtcaccaacaaggaagataggtctaaaggtccccgagagaatagcgataaaaagtagtttaaaatcgaataatgagtgtgcctcgatctgccggcctgcctgttcagggcatggaattaagactcggaatcggagtttggcattgcttcgcacagtggtgaacacaacaggtgacaatgcctgtcatcattacagaaactgaaaagaacaaacagtcggagcaaacgctcatcatcggtttaaccaaacatttggaagcaacaaatgctataatacaaacagtgcctaatgttgggcactgtttattttttgtcgaaaaaggaggaaggctttatggctgagccgattttacatattgaaggcctcgataaaaagattgggtctaaacagattttaaaacagatcagcatggacgttatggagggcgaaatcatcggcctgctcggtccaaatggttccgggaaaacaacactcatccgtatcatcgtcgggctgctgaaacaaaacagcggaagcgtgacaatcagcggattccagcatgatacagagtttgaaaaagcgatggaagcggttggagcaattgttgagaaccctgagttctatccgtacctgacaggctgggaaaacctcaagcactttgcgaatatgcacaaaaaaatagcggatggacggcttgatgaagtggtagaacgtgtcgggctgacgtcagcgattcatgataaggtgaaaacctattcccttgggatgcgccagcgtctgggaatcgcccaggcaattcttcaccggccgaagcttctcattctagatgaaccgacaaacggactcgatcctgcggggatgaaggattttcgcaatcatgttaaggaactcgcagaaatggaaggaacagctgtcctgttcgccactcatttattgcgcgaggttgaagacttgtgcgaccgtgtcatcatcattcaaaaaggtgagatcaaagcggaagtcagcttacaaggaactgatcaaaccacagaaaaagcaattatagaagtgcagccgcaagaaaaagcgctcaattggcttacaggcaatcaatatcaagctgagagccaagacgggacgattgtagttgaggtggcaaaagaaaacataccggagctgaaccgatcacttgtcggacaagatctgaatgtattttccattacgccttacacgcagtcactggaagacgaatttataaaagcgacaacagctcatcaagaggagggagaagagcttgtctaaattaatttggaatgaacatatgaaactttttaatcggaaggtcactttggtttctcttatcctgatggctgtctttcaattcttcatggcattgatcattaaacggattgtcatcagtgccggaacagatgaaaacttcatcggctatttatcgtatacaccgagcctgaacattttgctgcaggctttaacgatcgtaattgcagcaacaattgtttcgatggaatttgataaaaagacgatcaaatttttgctcattcgtccggttaaacgccaaaaggtcttttggtcaaaattaatcacagtcgtgatggtcagcttctatttgtatctggcatactacattctcgcattattattcggtctcgtgttttttggcacatcggtgactgcggaatcaaagacattgctggtcaacaccttggcgctgatcgggtcaaactggcttgaagctgtaatgatgggattattcgggctgctttgttcttcgctgttccgcaacagcgcggtagcagttgttgtttcttttgtcgttttatacggagcgagtacacttgttcagctcatgaagttgtttgaaaacaagtggggcagctttttgctttttgcgaacactgactttacgcaatacagaagcggagagacagcgttgttttcaggcatgacgccattgttttcaattggaattctcatcatacatgccatattcttcatcgttgttggctggtggtgcttctgtaaacgggatgttcgggtctaaaggcaaggaatgacatttttgtgaaaaagctcacgtaaatcaatatcatttgatattttggtttatactaaaggtactgacggaggtgtctcgattgaggaactttattaccgctttaccgatcatattgctgcttggattctcatttgtgtctttcatgtttcagtttgaacatcttgtttatttcaggctcgcgcttgggttgttttctctcgtgggactgtacatgatatataaaatgaagacgggcatccgctattttatcatctatctgtatgccagctggattgtgttggccgcagtgaccgcttttgaagagccgattttctcaagctttttctttggcggcctggtgatgaccatgggttacctgacatatatgctgatttatctcggcatgaaacaagaccgggatgcaaatcctgtgtaatcgcgctgttcccttggggaacggcgtgtttttctatactgggcaaaaggttaacagttgcggaaaaatggcagggaatctataatacatattaaatttatcggaattaaaactggggggctgccggatgtcattatttatacaaaacgatcaacagcggcaatggatggagaaaatcggacggattgcggatgaatttcagcaaacagctgctgaagatgacgaacagggacgttttcctgcagagaaaatacaaaaactgcgtgatgctgggtatacagcattaacattgccggcatctcatggcggagggggcatttctgtttacgatatgctcctgtttcaagaacggcttgcacggggagatgcttcgacggctcttagcatcggctggcatttgagcgtgatcggggagcttggagaaggcaacagctgggatgaagacgtatttgcatttgttgccaaggaagtccaaaacggagccgtcattaacagggcggcgactgaagcgaaaaccggaagcccgacaagaggagggcgtccgggtacacacgccgtcaaaaaggatggcaaatgggcagtgaacgggagaaaaacctttacgacgatgtcacaagctctggattattttttagtaaccgcatggattgaagacaaacaaacaacaggcgtgtttctcattcataaagatgatcccggcttgtcgattgaagagacgtgggatatgatggcgatgcgggcgactgggagccatgaccttgtactgaacgaagtaatgcttgatgagaataagctggtggaactgcttcaagggcctcgtggagctaagccgaatggctggctgcttcacattcctgcgatttatcttggtgtggctcaagctgctcgtgactatgcagtgcaatttgcatctgagtattctccaaacagcttgaatggaccgatcaagaatgtcccggccgtacagcaaagaacaggcgaaatggagcttgaactgctcaatgccagacactttcttttccatatcgctcaattgtatgacgatccggagcggcgtccacacttgaccagcgagctcggtgcggcgaaacatatcgtcacaaacgctgcgctgtctgttgttgataaagcgatgagaattgtcggggccaaaagcctgggacgaaccaacccgcttcagcgctattaccgtgatgtgcgcgccggtcttcacaacccgccgatggatgacgccgtgatacacaagctggcagctgaagcgtttgagtcataaaaaaaagagccttaccggctctttttatgtattgttttgctcttgcagatttttttgatgcttgcggtcaattctgtcataaataacgttcatcagctttggattgcccataatcgcctctttgttttcctggatcagctgttggtaagttttcactttacgcttcggcatgctccggcgccctcctgacatgtttgtattcactttctaactccgtcagcgacaattcatacagatgacgctttgactttttgtatataccattctgtattaacagatgaatgagctgtttttttctgatttctgcagactgaggtgtcattgtgtcaccaacctccaatcaaacgatattgataatcattatcaattaacttcagtatacaatgtccgcaatagcctgtaaagatgaaaagagtcctattctttctccaatttacaaacattcaacaaatcgacaaaaagtttcccgggcaataatttgctgtcgaaatattccgcttcattgaacgcaccctgctatttttcatgttttgaaccatactatgtaatagaatggaggctggtattcaatggagcggacagaaaatctgaaaaagggagaaaaaggggcgctcctcaatatttttgcatatgtcatccttgctgttgtaaagctagttatcgggattctatatcattctgaagcgctgagagcagacgggttaaataatggaacagatattgttgcgtcagtagcagtgctgataggattgcggatttctcaaagaccggctgacagcgatcatccatacggccattatcgggctgaaacaatttcgtctcttgttgcgtcttttattatgatggcagtcggcattgaagtgttaatcggcggaggaaaagcgattgcgggcggcacaacggaaacgccaaatcttatcgcggcatggacggcgttaggcagtgctgtgtttatgtatggcatctatttatataacaaaaggctggcagcgtccattaaaagctctgccctgatggcagcggcaaaggacagcaggtcagacgcttttgtaagtgccggcgcgtttatcggtgttttttcgtcccagctgaagctgccgtggattgatccggtaacggcttttatcatcggcatcatcatttgcaaaactgcgtgggatatctttaaagacgcttcacattccttaacagacggcttccatttaaaagatcttgagccttacaaacagaccgtcggcaggatcgaaaatgtgcatcgcctaaaggatgtgaaagcgaggtatttaggcagtacagttcatatcgagatggtgattacggttgatccgaagcttacagtagaagaaggccatggagtggcggatgaagtagaagacaaaataaaacatgaacacgatgtcactcatgttcatgttcatgtagagcctgacgacataaaataaggctgtttaacgaattagcttatatgttcagataaaaattcagtcacttcttcaggcgttttggcattggcgctgtgaaggtgagctgttttttcaccgttcttgaaaataagcaggctgggaatgcccattacttggtatttttcagccaggtcaggaagctcgtccttattcagctcataccaatcgttttgattgtattcttccaaaatatcgccgatgaacatattcatgcgtgtgcagtctgggcaccaatcagcataaaactttacaatgatttctttatcggattgaatcagttcattaaattgttcgtttgttgtgatttttttcatatgtcacatctccttttcaatgccattttaatataaaataaaaaggaattacatacaaatgcattcaacatcagcatgcccaaaaataattagatcattttccggtgaaaatgataagatagtaaagatgaattgtagtgggggagtatccattgaaaacaagtctaggattagtgtacggaggaaagtcggcagaacataatgtttccctgcagacggctctggctgtaatcaaagcgctaaatactgagaagtttgatatacatccgatttatataacagaaaaaggcgaatgggtaagaggcgctcgtttaactgagcctgtttcaaatgtgaaaatgcttcaatttgagcaaggaggcagtgctttttctccagctgccctgaaccaggagatgtttccgcaggaagcgtcacagcaaaatgaagccatcgacgtcgtattcccgctcctccacggaccgaacggagaagacggtacgatccagggaatgctcgagctgttgaacattccttatgtcggcaacggagtgcttgcttcctcagccggcatggataaagttgtcatgaaacatttatttgctcaggccggccttgctcaggctaaatacgcagctttccttaagaaagactggactcgttctccgaaagaaagctgtgagcaggttgaacaggaattaggctacccttgcttcgtaaaaccggcgaacctcggctcaagtgtcggaatcagcaaatgccgaaaccgtgaagaactgcaaaaagcgtttgagcttgctttccaatatgaccgcaaagtcgtcgtcgaagaaggcattaacggccgcgagatcgaaatcggcgttcttggaaatgacgatcctaaatgctctgttgtgggggaaatcgcaccgaagacggatttctacgattacaaagcgaaatatgaggatggagatactgatctgatgattccggcgattgtgactgatgaggaatacgcaacaatcagtgatatggcgatcaaagcatttaaagcgatcgacggttcaggactcgtcagagcggactttttcctgacagctgacggcgaagttctgatcaatgaagtcaacacaatgcctggctttacacctttcagcatgttcccgctgctctggaaagaagccggagtggaatatgctgacctgattgaacagcttgtggagcttgcaaaagaacgccacgctgaaaaacaattgattaagcatacattctaatgaagaaggacactgccggtaaaagggcagtgttttttcccgtatatacaaaagaaagagagggaccttacttgattaagcgaacagtaaaaaacattgccgaaatggttaatggcacactaacaaatccgcaatatgaacaaacagtcattcatggagtggcaaccgatacaagaaaactggaacaacatcagctcttcattccgctgaaaggggaacgttttgacggccacacttttgtggagcaggcttttgaagctggtgtagcggctgttctttgggatcggtcagaaccaaatccgcccgagaatcacgccgtcattttagtggacgatacccttactgcacttcagcagcttgcaaaagcctatttgcaggagcttggcacgcgtgtcatcggagtaaccggaagcaatggcaaaacgacaacaaaagatatgattcacgccgtattggggacccagtaccgtgtccacaaaactgggggaaacttcaataatcatatcggtttgccgctgacggttttagcgatgcctgaaaatacggagatcgccgtattggagatgggaatgagcgccaaaggagaaattgacctcttgagccgactggcaaacccggatgcggcagtgattacgaatatcggcgaatcgcatatgcaagaccttggctctagagagggcatcgcggaggcgaagcttgaaatcattaacgggcttaaagaagacggagtgctgatttatatcggggacgaaccgcttcttcaaaatgcatacagctgccagacgaaaacgtacggtacgggagcgcataatgattatcagcttcaggatgtcagccagagtgaggaaggaacccattttacaatcaaagggataaaaaacacgttttttattccaatactcggcaagcacaatgtgatgaacgccatggcagcgattgctgcaggagcttattttggcatcacgcctgagggtgcggcaaaaggactgagcggcctaaaggtaaccgggatgagacttgaactcatcaaaacagacagcggcctttcgataatcaatgacgcttataatgcgagcccgacttccatgaaagctgcaattcaattgacagaaagcctcgaaggctacggcaaaaaaatgctcgtgctcggtgatatgcttgaactcggcgatcttgaagaaacgttccataaagagtgcggcgctgtgatcagccctgataaaattgaccgcgtctttacgtacggaaaactgggagcttttatcgcggaaggcgccctgaaacactttgagaaagaccgcgtcagccattacactgagaaaaaagatctcctccaagctgtgaaggaaaacgcatcaaaaggcgatttgattttattcaaagcgtccagaggtatgaagcttgaagaaatcgttaaagatttaatagagagcccgctttcgtaagaaaatattttgcgaaaaaacgcatattgcatcataaaataacatgatgtgcaaacactaatgtatgccggccgaaaattatgtatatctggccggctgcggctatgatacaatatatataggttatttcgcgatacgaacatattcgtccggacttttcatcgtgacccgaagttctccgctggattcttgggagcggatggagcagcagccggcatattcgagatgccgatctgcttctcatcttattgaaaaacaaatagtgtaatggtaagataaaacttaaagtaattcgggctttgtatacggatggatcctgtccttcttgtctaaagggcagttttataagtggtaaatcacgacattactgaaacagcaattagaaggagtttgaataatttgactataacgtttcaagattttaatttaagttctgatctcatgaaagcaattaatcgtatgggatttgaagaagcaacaccgattcaggcacaaacgataccgctcggactttcaaataaagacgtcattggacaagcgcaaacaggtacaggtaaaacagctgcgtttggtataccccttgttgaaaaaattaaccccgagtctcctaatattcaagcaatcgtaatcgcgccaacccgtgaattagccattcaagtatctgaagaattgtataaaatcggacaagataaacgtgcgaaggttcttcctatttacggcggacaggatattggacggcaaatccgggcgttaaagaagaatccgaatattattgtcggaacacctggacgtcttcttgaccacatcaaccgccgcaccattcgtttaaacaatgtaaatactgttgtaatggatgaagcggatgaaatgttgaacatgggattcattgatgatattgaatctatcctttcaaacgtgccaagcgagcatcagacacttctgttctctgccacaatgcctgcgccgatcaaacgcattgcagagcgctttatgactgagccggaacacgtaaaagtaaaagcgaaagaaatgacggtttctaacattcagcagttctatttggaagtgcaagaacgcaaaaaattcgatacactgactcgccttcttgacattcagtctcctgagcttgcgatcgtattcggacgtacaaaacgccgtgtcgatgagctggctgaagccctgaaccttcgcggatatgcagctgaaggtattcacggtgacttaacgcaggcgaaacgtatggttgcgcttcgtaaatttaaagaaggcgcaatcgaagttctagtcgcaactgatgttgccgctcgcggacttgatatctcaggtgttacacacgtatacaacttcgacgtgcctcaagatcctgaaagctacgttcaccgtatcggaagaacgggccgtgcaggaaaaacaggtatggcgatgacgttcattacaccgcgtgagaaaagcatgcttcgcgcaattgaacaaacaacaaaacgcaaaatggaccgcatgaaggagcctacacttgatgaagcgttagaaggccagcagcaggttactgttgaacgtcttcgcacgacaatcagtgaaaacaacctgaacttctacatgacagcggcagctgagctgcttgaagatcatgatgcagtaacagtggttgcggcggctatcaaaatggctacaaaagagccagacgacacaccggttcgcttaacagacgaagcgccgatggtcagcaaacgctacaagaaccagcgctcttctaaacgcagagacggtcaaggcggcggctaccgcggcggaaaagggaaaagcaacaaccgttcttcctatgacaaaaagcgttcaaacgatcgccgttcttcaggtgacagacgccagaaaaaatcttactaatttgatcgattcagagcccaaaacatgatgttttgggcttttttatgttcgcgatttgttattcagcaaattttcagctgacggaagccatttttctctgtatgcttaagaatgaaacctttctgtaaaagagacgtataaataacgacgaaaaaaagggaggtaggtatttttgagagagcagccaaaaaaccaaatcagtccagacggattaaaggtttggcgacttcaagagatcatcatatccgctgtttgcttacttattgtcattgcagttgcagtgttaagctattattttcattggccgtactggatcagcggcgtgctcggcgcggtttggctgttgggatcgattgtgacggtctttatcattccgaaggtccgtcataaggtgtggcgatatgaagtccatgaacatgaaatagatattcagtcaggtatttttgtggtaacacgtgtgattgttccgatggtcagagttcagcacgtcgatacgtcacaagggccattattaaaaaaatacaacctggcaacggtgaaaatttccacggccgcgaccgttcattcgatccccgctttagagatggaggaagcggatcggctgagagactccatttcccgtctggcgagggtgactgacgatgatgtctgaaccgaaacgcctgcacccggcagcagtcattttgaatttatgccataccattattcaaacgataaaaaatatcattctgccattcttttttgtgtatattgtcaattcaaaccatactgtccgtttttacggagccattgcgctcggtgtgctattcatctggcttgtagcggcaagcattatcaaatggagaaggtttacctatcgaattgaagatgatgaatttagaatcgaagaaggcttatttgttacgaaaaagcgatacatatcgattgatcggattcaaacgatgaatacgagcgcaggccttgtccagcaaatctttaagcttgtgaagctgcaaattgaaacagcaggcggaggcaaggaggcagaagccgttctttctgctatttctgttgaagaagcggaacgcatcaaagaagctgtctttaagaaaaaagcgcaaagacgagaaaatgaacttgatgaagaacggcttgaagctgaagaggagttggttccggccgttgaggtgcaagagcactatcgcatgaacgcgaaagaattgctcatggccgcttctacctccggcggaatcggagtcattatctccgctgtatttgcacttatttcccagcttgatgaagtgctgccaatggattggttattcgataagttttccttccttcagcacgccagcatcggtatttacgcggtactgatttttatcggtttatttatcgcctggattttcagcatcgcgggcatgatgtttagatacgcgaactttcaaatcataaaaaaagagcaggaactggtgatttcaaggggaattattgaaaaacatcaagtcacgattccattgcgaaaaatacaagccattaaaatcaaagaaaatatcattcgccagcttttcggctttgtaacggtgtccatcgtcagcgcaggaggcggcgaccgggaaaaagaagaaggcgctttgaccattctctttccaatgattcataaaaaaaagcttccgcacatgctccgaacatttacgccggaatacacgctggaagaaaactgccgccgcctgccgcggcgcgcgttgaaacgctatttgttccgttctgtcattttttcactatttttgatcatcccgttatgtatcttctttcagccatggggctatctgtcagccatcctgctgccgatagaattgttcttcggctatctcgcgtataaagaggctgcatggacgatcaacggggaccgtcttcagctgacgtctagatttataggcagaacaaccgccattgtactgaaaaaacgaatgcaggtctgcaagttcagccaatcctatttccaaaagaaaggccgcttgtataccatttctacttcggtgaaatcatcgagccatatggaagaattaacggtgagggatgtaggtgaagaggatgcagccttcattttaaactggtactcatatgaaaaagcggacggttaataccgccgctcttttttttgcacgcataaaaacgaaagaagaaacccgccgcatagtccaaacagatgggccatcatgttaatattggagttgataaacgacatgagaacggcaaatgcgagcagtgtgatgatcattttggaatgctcctgccctattagttcattgcgaaaaagaaccataaacaggtacacgccgaatagcccgaaaattgcgcctgaagcaccgacatgcacgtaatcaagcggctctgtaacataagtgccgatattgccgatgatgccggagccggcgtatacaagaagaaaacgcgcttttcccagcatgcgttccaaagccggggcaaataaaaagatggacatggaattaaacagcagatgtgtgaaaccggcgtgcagcaaaatcggtgtgatcagccgccaccattcaccgtttgcgacacctagattatagcctgtgacggtatccctccataacacaactgaatgggcaggaagtgaaaaaaacagccagagaacagcttgcaaagccaatataaaggtgacaacggggtaaagcctgataaatgtttgaaaattttcagtccgtataaacattccgagccccttttcttcattttggtatatctatagtaacacgtttatgagacaaaccatttaaatagtacgtacgcaaaggaggttatcatacatgatttacggcattgggctggacattaccgagcttaaacggatcgcctctatggctggacgccagaaaaggtttgccgagcggattttgacgcgaagcgagcttgaccaatactatgagctttcagagaaaagaaaaatcgaatttctcgcgggcagattcgcggcaaaagaagctttctcgaaagcgtttggcaccggcattgggaggcagctcagctttcaggacattgaaattaggaaagaccaaaatggcaagccctatatcatttgcacgaaactgagccaggccgccgttcacgtatcgatcactcatacaaaagaatacgctgccgcgcaggttgtgattgaaaggttgtcaagctagtctgcatattagggaaaccccactcatatatttgatagtgcattaagggagacaagttgtttgaggcttttatggtacgcatctgttctgcctaaacgtgtaccgagcgtaccgttaaagtcaaacaagcgatttcttccttttacatcaattgagaaaaaggggttgaaaaaggtgagaaaaagctttgttttgcttttaacgggactgcttgctgttcttattctttctgcctgcgggcaaaaaacacagcaagatattgtggccgggttagatgaaaaggcgaaagaatacacctcgtacaaagcaaaagcgaaaatgaccatcgagacagggagtgagcctcaagtatacaatgtggaaatctggcacaaaaagccgtctctgtacagggtttatttagaaaatccgaaaaaggaccaaaatcaagtcattttacgaaatgaaaacggagtattcgttctcacgccgtctttaaataagagcttcagatttcaaagcgattggccgaacaacagcagccaggtttatctgtttgaatcgctcgtaaaggatgttcaaaacgattcggatgcagttttcacagcgaaagaaaagaaatacgtattcgaaacaaaaacaaactatcagcataacaaaatgctgccgacgcaagaaatcacatttaacaaaaaagatatgagcccgtcatctgtcaaagtgatggataccgaccggaaagtgatggtcaaagtagaattcagcagctttgaatttaataaacaatttgataaagaatcatttgatgaaaagaaaaatatgaccctttctcaaatggatgtcgccacaagcgcgaagccttccgatacatttgcggtcaaaacgccgctggaactgccgcttggcgtcaagctgcttgaagaaaaagatatatctactgaagacgggaagcgcatcatcatgacgtacggaggagaaaaatcatttacgttaattcaggaaaaagcccagattgccaaggcttcctcctccgttacgctgaacggcgaaccggtaaatctcggctacaccatcggcgccttgtcggatgcatcattgtcatggacatatgaaggcgtagattaccttctctcttctaaagatctttctaaagaggaaatggtgacagtagcaaaaagcatgcagggacaatcatcgaaataacaacaaaggccaaacatgatttggcctttttttcgttagacatcgtttccctttagcctttaattttagtatgatatgtaaatgatattgaataaaagctaggaagtgtcgtaatgagcacaaaacctttttacagagatacgtgggcggaaattgacttgtccgcgataaaggaaaatgtcagcaatatgaaaaaacatatcggtgaacatgtccacctgatggcagttgtgaaagcaaacgcctacgggcatggtgatgcagaaacagcaaaggctgctcttgacgcaggtgcttcatgcttggccgtggctattttggatgaagcgatttcactgcgcaaaaagggcttgaaggcgcctatattggtgcttggcgcggttcccccagagtatgtggcaatcgctgctgagtatgacgtgaccttaacaggttattctgttgaatggcttcaggaggcagcccgccacacgaaaaaaggttctcttcattttcatctgaaggtcgatacggggatgaacaggcttggtgtaaaaacagaggaagaagttcagaacgtgatggccattcttgaccgtaaccctcgtttaaagtgcaaaggggtatttacccattttgcgacagcggatgaaaaagaaagaggctatttcttaatgcagtttgagcgttttaaagagctgattgctccgctgccgttaaagaatctgatggtccactgcgcgaacagcgccgccggactccggctgaaaaaaggcttttttaatgcagtcagattcggcatcggcatgtatggccttcgcccgtctgctgatatttcggacgagataccgtttcagctgcgtccggcatttaccctgcattcgacgctgtcgcatgtcaaactgatcagaaaaggcgagagcgtcagctacggagccgagtacacagcagaaaaagacacatggatcgggacggtgcctgtaggctatgcggacggctggctccgaaaattgaaagggactgacatccttgtgaagggaaaacgcttgaaaattgccggcagaatttgcatggaccaatttatggtggagctggatcaggaatatccgccgggcacaaaagtcacattaataggccggcagggggatgaatatatttccatggatgagattgcaggaaggctcgaaaccattaactatgaggtggcctgtacaataagttcccgtgttccccgtatgtttttggaaaatgggagtataatggaagtaagaaatcctttattgcaggtaaatacaagcaattaacttacctaaatggagaattcataaaacagctttgcttgaagagtgaataatggtatcattatcactggatggataaaagagtcgtatccgtaagtttggtggaggtgtatgttttttgtctgaatccagcgcaagaaccgaaatgaaaatcagcttgcccgaaaacctagtagctgaattggatggtgtagcgatgcgggagaaacgaagcagaaacgaactgatatcacaagcagtgagagcgtatgtcagcgaacgaacaactcgtcacaaccgtgatttgatgagacgcggctatatggaaatggcgaaaatcaacctgaatatttcttctgaggctcactttgcggagtgcgaggctgaaacgacagttgagcgcttagtcagcggaggataatcatttgattgtgaaacgcggcgatgtttattttgctgatttatctcctgttgttggctcagagcaaggcggggtgcgcccggttttagtgatccaaaatgacatcggaaatcgcttcagcccaactgctattgttgcagccataacagcacaaatacagaaagcgaaattaccaacccacgtcgaaatcgatgcaaaacgctacggttttgaaagagattccgttattttgctggagcaaattcggacgattgacaagcaaaggttaacggataagattactcatctggatgatgaaatgatggataaggttgatgaagccttacaaatcagtttggcactcattgatttttagacatatttgcaggttgctcaaatagagcaactttttttgttttcaaaaaacataaacgatataatagtgaaataacgaaaaaatatgttgttttttattgggaggtaagcgaatttgatgtcgaaccagactgtataccagttcattgccgaaaatcaaaatgaactgctccaactgtggactgacacactaaaagaattaagcgagcaagaatcctatcagctgactgaccaagtgtatgaaaatatatctaaagaatatatcgacattctgttgctgtctgttaaggacgaaaatgctgctgaaagccaaatcagcgaactggcgcttcgagcggtccaaatcggactgtctatgaagtttttggctactgcgtttgctgaattctggaagcgtctctacacgaaaatgaatgataagagattgccagatcaagagagcacggaattaatctggcagattgaccgctttttcagcccgattaacacagaaatttttaatcaatactcaatctcatgggaaaaaacagtatctctgcaaaaaatcgcgctgcaagagctgtctgcgccgcttatcccggtgtttgaaaatatcactgtgatgcctcttgtcggaacaattgataccgaacgcgcgaaacgaattatggaaaaccttcttaatggcgtcgtcaaacaccgttcccaagtcgtgctgattgacattacaggtgtccctgtcgtcgatacgatggttgcccatcatattattcaggcatcagaagctgtaaggcttgtcggagcaaaatgcctgctggccggaatccgcccggaaattgctcaaaccatcgtcaatttggggattgatttatcccaagttataactaagaataccctgcaaaaaggaattcaaacagcattggaaatgacggatcgaaaaatcgtttcattgggggaataacattttgagacatccgaaaatcccgatcttgaaactgtataattgcttattagtgtccattcagtgggaacttgatgaccaaacagcattaacctttcaagaagacttattaaataaaatatacgaaacaggtgctaacggagtcgtcattgacctgacatctgtggatatgattgattcatttatcgcgaaagtgctgggcgacgtcattacaatgtctaagttaatgggggctaaagtcgtcttgaccggcattcagcctgctgtggcagtgacgctgattgaacttggaatcgcacttgaggaaatcgaaactgcgctcgacttagagcaggggcttgagacattgaagcgggaattgggggaatagcgaatgaacgaccaatcctgtgtaagaatcatgacagaatgggatattgtggccgccagacagctgggacgaaacgttgcgaaagaactgggtttcggcacggtagaccaggctagaattacaacggctatttcagaattagccaggaatatttatttatatgccggcaaagggcagattggaattgaacaggtcgcagacagaggaaaaaaaggcctgaaaattatagcggaagaccaagggccgggaattcctgatatccgaaaagtcatggaagacgggttttcaacgtctggaggacttggtgcgggacttcccggggtcaaaaggctgatggatgaattcagcttaaattccgtagcgggggaaggaacagagatacaagccatcaaatggcttcggtaggaggtaagaacgtggattttagggaggttattgagcagcggtatcatcagctgcttagtcgatatatagccgaattaacagaaacatctttatatcaagcccaaaaattcagccgaaaaacaatcgagcaccaaattcctccggaagaaatcatcagcgttcacagaaaagtgctgaaggagctgtatccaagtctcccggaagatgtgtttcattcgctggattttttaatagaagtcatgattggctatggaatggcttatcaggagcatcaaacccttagagggatacagcaggaaatcaaatcagaaattgaaatcgcggcaaatgtccagcagacgcttctcggaactaaagttcctcaggaggaagcgctggatatcggcgccatcagtgttcccgctaaacagatgagcggtgattactaccactttgtcaaagacaaggaatccatcaatatcgcaatcgcggacgtgatcggaaaaggcattccagcggctttatgcatgtccatgattaaatacgcaatggactctttgccggaaacgggcatacacccttctcaagtgctgaaaaatttgaatcgtgttgttgaacaaaacgttgatgccagtatgtttattacgatgttttatgcgaattacaatatggacaagcatcaatttacatatgcttcagcgggacatgaaccgggattctattattctcaaaaagacaacacgttttacgatttagaggccaaaggactcgttctcggcatctcgcaggactatgactacaaacaattcgatcagcatctggaaaagggcgatatgattgttttattttctgacggcgtcacagaatgcagaacggaaaacggtttcttggagcgtcctgatctgcagaagctcattgaggaacatatgtgttcctccgcgcaggaaatggtcaaaaacatttatgacagcctcctcaaattgcaggattttcagcttcacgatgattttacgttaattgttttgcggagaaaggtttaacgtctgtcagacgagggtataaagcaactagtgatttgaaggaaaatttgaggtgatacgaatgaatataaatgttgatgtgaagcaaaacgagaatgatatacaagtaaacattgcaggagaaattgatgtatactcagccccggtgcttagagagaagctcgttcctctggcagaacaaggagctgacttaagaatttgcctgaaagatgtcagctacatggacagtaccggattgggcgtttttgtagggacctttaaaatggtgaaaaaacaaggcggttcgctgaaacttgaaaatctttctgaacggctgatccgactgtttgacattacaggcttgaaggacatcattgatatttctgcaaagtcagaaggtggagtgcaatgaagaataatgctgattacatcgaaatgaaagtgccggcccaacctgaatatgtgggaattataagactgacgctgtcaggggtcgcaagcagaatgggctatacgtacgatgaaattgaagacttgaaaatcgcagtcagtgaggcgtgcacaaatgcggttcagcacgcttacaaagaagataaaaatggggaagtgtcaatacgattcggtgtgtttgaagaccgtttagaggttattgtggcggatgaaggagacagctttgactttgatcaaaagcagcaggatctagggccgtacacaccttcgcacacagttgatcaattatcagaaggagggctcggtctatatttaatggaaacgctcatggatgaagtcagagtgcaaaaccactccggcgtcaccgtagcgatgacaaagtatttaaatggggagcgagttgatcatgacacaaccatcaaaaactacgaaactaactaaagatgaagtcgatcggctcataagcgattaccaaacaaagcaagatgaacaagcgcaggaaacgcttgtgcgggtgtatacaaatctggttgacatgcttgcgaaaaaatactcaaaaggcaaaagcttccacgaggatctccgccaggtcggcatgatcgggctgctaggcgcgattaagcgatacgatcctgttgtcggcaaatcgtttgaagcttttgcaatcccgacaatcatcggtgaaattaaacgtttcctcagagataaaacatggagcgttcatgtgccgagacgaattaaagaactcggtccaagaatcaaaatggcggttgatcagctgaccactgaaacacaaagatcgccgaaagtcgaagagattgccgaattcctcgatgtttctgaagaagaggttcttgaaacgatggaaatgggcaaaagctatcaagccttatccgttgaccacagcattgaagcggattcggacggaagcactgtcacgattcttgatatcgtcggatcacaggaggacggatatgagcgggtcaaccagcaattgatgctgcaaagcgtgcttcatgtcctttcagaccgtgagaaacaaatcatagaccttacgtatattcaaaacaaaagccaaaaagaaactggggacattctcggtatatctcaaatgcacgtctcgcgcttgcaacgcaaagctgtgaagaagctcagagaggccttgattgaagatccctcgatggagttaatgtaatgatccaggttgaagaaaacgagcatattcaaactctagtatatcaactgaataaagaagggaaatcgatttgcggtgacagtttttttatgaaagctgatgataaggagttaatttgcgcggttgctgacggactgggaagtggatcacttgctaacgaatcctctgcagccatcaaagacttagtggaaaactatgcgagtgaagacgtagaaagcattatcgaacgctgtaatcaggcgatgaaaaacaaaagaggcgctacagcatctatcctgaaaatcaattttgagcaaaggcagtttacgtactgctctgtcggaaatgtacggtttattctgcattccccgtctggtgaaagcttttatcctctgccgatttcgggctatttatcaggcaagccgcaaaaatacaaaacgcacaccgccacctatgaaaagggttcaaagttcattatacatacagatggactcaacgtacctgatatccgctcccatttaaaaaaaggccaatcggtagaagaaatatcgaattcgctgaaaatgtatacgacatcgagaaaagatgacctgacctatattctcggacagctgtcctagagaataagaacaagaagaagccggaatgccggcttctttttttatgtgtttttttcggtttttgatacactagagacagaacgacaaaattggaggctttggttacatggaaacgtcagcccttttaaaacagcaaattgcgaaagaaataggtttatcacaaaaacacgttgaaagtgtcatccgcctgcttgaggacggcaatacagtcccgtttattgcccggtatcgaaaagagcagacgggttcaatggatgaggttcagattcagacgatttctgaacgctggcaatacatacaaaacctgaatcagcgaaaagaagaagtcatcaggctgatcgcagagcaggataaactgacagatgatctaaaacgtaaaatcgagcaatcggtgaagcttcaggaagtggaagacctttaccgcccttataaacaaaaacgtaaaacaaaggcgacagtcgccaaaagcaaaggccttgagccgcttgccgactatatcctgacacttccccaagatgatcgtctggcagcaactgcagaccaatacatcagcgaagaaaaagaagtgtttacgcgagaagaagcgattgaaggcgccaagcacattattgcggaacaaatttcagacgagccgaccttcagaaagtggattcgccaggaaaccttcaaaagaggaaccattaagtctgcagcaggaaagtcggcagacaccgatgagaaaaatgtgtatgaaatgtattacgagtatgaagagccaattgcaaaagtcgttccgcatagggtgctggcaatgaaccgcggcgaaaaagaagacattttaaaggtagcgattgaaccgcctgcggatcacattaaggcgtatttagaaaaacaagtcatcaaaaatcgctcaacatccgtaagagagattttgcaggagacaattgatgacagctataaaaggctgatccagccggcaatcgagcgtgaaatcaggaaagagctctcagaaaaagctgatgaacaggcgattcatattttctcagagaacttgagaaaacttcttttgcagccgccgatgaaaggcaaaaccgttctcggtgttgacccagcctttcgaaccggctgtaagctcgctgtgtcagatgagactggaaaagtcttgaaaattgatgtgatctatccgcatgcgccagtcaacaaaacaaaagaagcccatgaaaaagtgaaaaagattcttgagcagtatcaagtcgagatggtggcgatcggaaacggcacagcatccagagaaacagaacaattcatcgtcaatgtactgaaagacatgccgcgcaaaatttattatgtgatcgtcaatgaagcgggtgcaagcgtctattcggcttcagagctggcccgagaagaattccctgaccttaaggttgaagagcgcagtgccgtgtctattgcgcgaagacttcaagacccgctcgcggagctcgttaaaatcgatccgaagtctgttggtgtcggacagtatcagcatgacgtcagccaaaaacgcttaaatgaatctctgcggtttgtcgtcgaaacggtcgtaaaccaggtgggagtaaacgtcaacacagcctccgtcgcgctgcttcagtatgtagcgggattatcgaagtctgtagcaggcaacgttgtcaaaaaacgtgaggaaatcggaaagttttcaaatcgaaaagaactgaaggacatcccaaggttaggtgcgaaaacctacgagcaatgtatcggtttcttaagagtgcaggaagggacagagcctttggatagaacaggcatccacccggaaagctataaagaaacaaaagcacttttgaaaaaactcggactttcaacagaacatatcggcacggcggaattgaaggacaaaatcaatcagctggcgctctctgaaacggcaaaagagctgggaatcggcgaaatcactctgaaagacatttgtgaacagctgacaaggccggaacgcgatccgcgcgatgaggtgcctaagcctttgctgaaaacagacgtccttcagctggaagatttgaaagagggaatggaactgcagggcaccgtgcgcaatgtagtggacttcggagcgtttgttgatatcggagtcaaacaagacgggcttgtgcatatctcaaaattgagcaatcaattcgtcaagcatcctcttgatgtcgtatctgtcggcgatattgtgacagtttgggttgacggcgtagatgtacaaaaaggcagagtatcgctgtctatggtaaaataaaagcactgcttacgagcagtgttttttcctatagaaataccagcattgattcagcagtttaatttggtaattatctttttcaaggaacgctttttgcatctgctttttaagccaatttggcataggctcattcctcctcagcttttatcataagagggacggtgattaccatattgtatgcgaacggtgaattgtcccgttcaatgttttttaagtgaggtgcgctatggataatatagagcttcaaaagctgacagaggatatttctaaaacatattttaaaaagccgttccgccatcaggcgctttttaatgacaggcttaaaaccacgggcggaaggtacctgttaacctctcataacattgaattgaacagaaaatatctgattgaacacggcagggaggagctgatcggcatcatcaagcacgagctctgccattatcatctccaccttgaaggaaaagggtacaagcacagagacagagattttagaatgctattgcagcaggtcaacgcgccgaggttctgtacaccccttaagaaaaaagcggaaaacaaaaaaacttatatgtatatctgtacggcctgcggccaacagtatataaagaagcgcgccatgaaccctgacagatacagatgcggaaaatgccgcggaaaaataaaaagaattttttcgtgaaaaaggttgacgaatatggcaagcctatgttacattataaaagtcgtcacgagagataaataaaaacatttacctcttgacactgcaaatcaaggctgatataataagtcttgtctcattattccacagtagctcagtggtagagctatcggctgttaaccgatcggtcgcaggttcgaatcctgcctgtggagccatattggagaagtactcaagtggctgaagaggcgcccctgctaagggtgtaggtcgcgtaagcggcgcgagggttcaaatccctccttctccgccataagatttcgatataagttctcaaccatcggcccgttggtcaagcggttaagacaccgccctttcacggcggtaacacgggttcgaatcccgtacgggtcattccatttcgttgggctatagccaagcggtaaggcaacggactttgactccgtcatgcgttggttcgaatccagctagcccagccattttttattttttgaaatctaatagtaagagccattagctcagttggtagagcatctgacttttaatcagagggtcgaaggttcgagtccttcatggctcaccatttgtatttttgcgggtgtggcggaattggcagacgcgctagacttaggatctagtgtcttacgacgtgggggttcgagtcccttcacccgcactttatttacaaagtgcacgcaaatcggttttactaggttaagagcctactaaaccagcacaaacacaatttaatgatcacgcggtcgtggcggaatggcagacgcgctaggttgagggcctagtgggtgaataacccgtggaggttcaagtcctctcggccgcatcaatgataccaagggtttagagtaccttggtattttttgtatcttttgaacagaaggtattttgtgattaaaactgaccacttacctaaagtaagtggtttgatttgtccgcaaaagtatatagttaaataagataaaaaggacatagtatatcagcatacaaaatatgttatgcctttttttgttttaataacgcatccgttattttcagcgtacaatgttactttattatggaataaaaacaagtgtctgtaagcttgcttccatctgcggataaatcatcatttcttaaagtgccttcgaatacaaacccaagtttttctggaatagcacgacttttaaggtttgttgattcacatcttatttcaattcttctaaatttaatattgtttaacccaaaatcagctaatttttttactgcttctgtcatatatccattcccgccaaatttagtatttacccagtacccaatttcacatttaggaatggtccagtcaatcctctgaaggctagttattccaataaagttattgctagctttatcaaaaataagaaaacgaaaactttccctctttaaaaaatttatatgagcatttcttaaatttatctctgtttcttcaacagtaggaagttcttgagcaaatggcaaccaggcttttaattcattaaaggaacccctaattgcttggtttacaattttcccgtctcctgtttggtgtggtgctcgaaggattagtctttctgtttccaattgtaaaggcacatctaacaataaaggattcatttgatttctcctctcggaattttatattaaagaagcaaagtaatacaaaataaagctttatgacgtgcgcaaatttagttcaatttgcgtttaatcttctaaaagatattttcgtaactgacatcatatacctattgtgagaaagtcgatgataagtatcatgagatggaaggtatgccaataaacggtgaaaatgatcgtcttggcttatcaaagaaaacaccagactatgaagaagcaaaagatgaagagacaaagttaggagtaaaacgtgtgtttactcctcttttttaattcttgggttcattttcctcattctgggtgttcgattgggtgctcttttttcggtgaatttttttcctgtcaacatctccatttgacgtctagctctggccatttcagtaggaagaatgtaaatatattcaagtatcttatttgtaaatttaaataaaggctcaaccatagtactgttaaattctatatcatcaccatgagcagctgcattccctgcctctttaatcatcttagaaagaccgcccattaaaggtggtaaaattttcttttcctctaagtcgttaagttttgcatgaagcgttcttccaatagcccctttatttttacataccatttccaaagttcttctaagagccattaggcacaccatagcatcaattttccttacatttaaagctgactcataagcagatttaatgtttttaggtaagaggtttaaattcacctgttcactatatgggaacaaaacttgaccatctttataaatatcatcaccctcgttgtatacttcttcagtattccaatgagtatgatacagttgaaattcaaaacaaacaggacactcgaacacttcaaatatgtcattaaattgggcttcataagaggttaatggtacaaatgtttttttttcatatctgtttaacaaattcataggtgccttagttccacaatgtgggcaagtgagaattgtattttctgtcattttatctccctcaatagatttttcctcgtattataacactcttgtttaaattgttaaaatttatcactaatgatttaatagttagcaaatttatatgaaatctaaggaaatagaagatctcaataatgcttatgagactataaaagaaattgagaagcaagggcaattaactggcatgttggaatactatttttacttttttaagggtatgtacgagtttaggcgtaaagaattaatttcgtgataagtgcttattgaatagctgaatcaaagttgtcagaagttgaggatgaaatagagaaagcagagttttttttcaaagtgtcctatgtatattattatatgaaacaaacatacttctccatgaattatgcaaatcgtgcactcaaaatatttagagagtatgaagagtatgctgtccagactgtacgttgtcaatttattgtagcaggaaacctaatcgattctttggaatatgaaagagccttggaacaatttttaaactctttggaaattttcaaggaaagtaacattgagcatttaattgcaatgtcacacatgaatattgggatttgttatgatgaattgaaagaatataaaaaggcttcacaacatttaaacttggctttgcaaatttttgaaaaatcaaaacatagttttctaacaaagactttattcactttaacctatgtggaagcaaaacaacaaaattatgacgttgctttgacatactttaggaaaggacgatttattgtcgataaaagtgatgacaaagaatactcagcgaaattcaaaatattagaggggttatttttttcagatggcgagactcaattaataaagaatgcattttcatatctggcttcgagaaaaatgtttgctgatgttgaaaatttttcgattgaagtcgctgattattttcatgaacaaggaaatttaatgctctctaatgaatattatcgtataagtattgaagcaagacgaaaaattaaaaaaggggagatcattaatgaaaatcaaccggattctattggcagcagtgatattaggtagtgttttatcatttggacattttattgatcaggatgttaaggcatcaatacaagtagcttctgatagagttggggcataattagataagaaagagtgaggttgaataatatactcactcttttattgattaaagtaatactcctaataatattatttcccttgatgtgctaaaattaagttatattggtacttttcatcatcattataagcttaaaaaatatggtattaatctaacagtgaaagaggaatgtaaaaatgaaagaggctaatgatcattatcctagttacggggcaaataaatttgtgtgtccaacatgtatggtgtattcacaacaaaagtggtatgagattcaaaaaaatgatatggataacgaattaattctcacagagcatttaagaacaagagggcgtgtgcctgcttatgcaagtccaaataaagaagctagtgttatacatgctatacctcaatttcacaccgataacataactgctctaagtgtgtgtatcagttgtgatcaaccggcttactggattgatggagaattagtttaccctaaaaatccaactgtgaaacctccaaattccgacatgccggaagaagtgaaaaaactttataatgaagcgagagaaataagtgtactatcacctagagcttcggcagcattacttagattagcattagaaaaattattacctttattaggtgcacaagggaagagaataaacgatatgataggtgacctagtacagaagggactttcgccgaaaatacaacaggctttagatagcttacgtgtaattggaaatgaagccgttcacccaggttcaattgatttagatgaagaaaaagaggttgcattagcgctatttaagttaataaatttagttgtagaacaaatgataaccgaaagcgatgaaatagatgagatttatagtctaattcctaaggataaacgagatgggatacaaaatagggatcaaatgaaaacaacaaaataagctaaaaaaatgaacataccacaacgatgttggtatgtttgtttattgaaagaacattcatgaataagttgaggtcataggaaaagtgtttttcttcttaaagaagtgcccattttctgcccagaattaataataaattatcaaaatcagtgtaaataatataactcgatgctatgaataatggcttttgtaaatgaagatatgattttgctaggttgagggactcgaattaaaaaagaagataccaaactatattggtatcttctttttttttgcatcagagttattaaatctttttatattgctgatgttaaattaatgtcccatttttacactaacgatgtgacttatatgataattatatacaaaaatcacttatatctagaaaattaaacaaatttacacaaaaaaggacaaaataatctttacaaattacgacaaatacttgatgttttttgtaatcaacccttattttgtgacaaatatatgaatattttgtcaccctgtaaaatatttatttattatatatatttaattcgagaggaggtcatataaagaacgaatattcgaattagtatgaatttaccgggagatagattcataaaacaattaaataatgggagtgggagtctatgagaaagggctttgtgcctaaagcttacatactgaatcttaggaaaaccctaatgatttttgcagtcttgttattgattgctggcaatgtgttgacagttttgccgaatcatattcatgctgaagataatacagaggtaactcaaagtgcagatactacttgcccagctcctgttgcgttgattaacggaagctttgaacaaggtgctgcaagaggatctgcatatgataaatccggactctattatctcgaatccgaggtacctggctggaaaacgactgatgattcctctggtcagaaggcaattgaaatatggaactatgcacagaatattccggctgttgtgaaaaattggccagcacctccggatggcaatcgctgggctgaattaaacgcttttgaaaatggcatgttgtatcaagacgtgaaaacaacgcctggacaaacgatttattggcgcttatctcatatgggacggcaaggtgttgacaccatgcaggttcgtattggggcagctactagcaatccatacagtacggtggttcaaaaacaattctctgatggaagaactgcatggggaactcatacaggttcttatactgttcaagcaggccaaacgacaacgcgattcggttttgaagctgtaagtacagcgtctggaaatataggagccggcaactttttggatgatattttccttggaacagaaccatgtgtgacggcaaataagtcagtttcaccacagggagaggtacaacccggggatgagcttacatacgcggttcaaatcaaaaatgaaggcggagacgttgctgctgatgcaagcttttcagatgcaattccagagggaactgaatatgttcctggatcattaaaattaattaacggttcgacaacaaagaatttaactgatgcagcagatggtgatgaaggcaattttgatggtaataaagtaaatgttgcattaggagatctacctaacacgaccaacttgcctaatggaatgactgtacagtttaaagtgaaagctaagacaggttatgtcggcaaagaaatttctaacaaagcgcaaataaactatgacagtctattaacgaatgcaagtaaaaaaactgaatcaaacgaagtaacgactccggttgtttttaaagatcctgtacttgaatcaaagaaaacatctgctattaaggcaaaagcggatggaaaccaagacgtggatcacccagaagttggagatacgctttcttacacgattcaaacacgaaatacaattgaagacagtcaggtgaaaaacgttaccatttcagatgcggtgccagaaggcttagaatatgttccgggctctttacaagtagatggcacatcagtcagtgatgctcatgatgatgataaggggcagtatgctgatgggaaagtatcaggacaggttggtaatataagcgataccaaatggcataatgtgacttttgaagcgaaagtgaagtccggtcaagcaggaaaggatattatcaataaggcaagcatttcaggagataatattgaaactccggatacaccgagtaatgaagtcaaagtttatccgaggaatcctgccttagagtctaagaaaacatcagcaattaaggaaaaagtggcaggaaacaagtatccggatcacccggaagtaggagacacgcttctttacacaatccaaacacgaaatactgaagaagacagtgaggctaaaaatcttacgatctcagatgctctaccaaaaggactggaatatgttccaggcactctgaaagtagacggtacagcagtcagtgacgccaaagacgatgacaaaggtgatgtgacagacggtaaagtgtcaggccaaattggtgatgtgactgatactgaatggcataatgtgacctttgaagcgaaagtaaaggccggacaagctggtgaaacaattcaaaatacggctagcgttactggaagcaacgtcgacacaccagataagccgagcaatgataccgagatttatccaagaaagccaaatgtagaatcgaagaaaactgcaagcctacaggaaaaagcagagggcaataaagatgagaaacatccagaagtaggagatacacttctttatacaatcgaaacgagaaacacaattgaagacagtctgctgaaagatctcgtcatttcagatgaacttccggacggattagaatacgtttcgggctcactcaaagtagacaataaaggagtcagtgacgccaaagacgacgataaaggtgatgtgacagatggcaaagtgtcaggtcaaattggtgatgtgactgacacagaatggcatactgttacctttgaagcgaaagtgaaagctggccaagctggtgaaacaattcaaaatacggctagcgttactggaagcaacgtcgacaccccggatactccaaaaaatgaagttgaagtttatccgaggaatcctgccttagagtcaaagaaaactgcaagtattcaagcaaaagcagagggcaataaagaagagaatcagacacaagtgggagatacacttctttatacgatccagacaagaaacacaattgaggatagtctggtgaaaaatcttgtcatctcagatgaacttccagaaggcctagagtatgtttctggaacgctaaaagtagacaataaagccgtcagcgacgcccaagatgatgataaaggcgctatgacagacggcaaagtatcgggtcaaattggtgatgtgactgatacagaatggcatactgtaacctttgaagtgaaagtgaaagctggccaaagagatcagaaaattgtgaataccgccagcgtcacaggtgacaatgttgataaaccagatacaccaagccatgaggtcaaagtttacccgaaaaatccagtcttagagtcagagaagacagcaaagaatctggattccgataaagagaagtatgaagcaggagatacgattgtttacacgatcaaaacaagaaatacagtagcagacagtaaagtaactgatctcgtcatctcagataaactgccggaaggcttagaatatgttccaggcacactcaaagtagacaataaagaagtcagtgatgcccgagatgatgataaaggcgatgtgacagacggcaaagtatcaggccagtttggcgatgtgactgatacagaatggcatactgttacatttgaagcgaaagtaaaagctggtcaagcagacaaaaaaattgtcaatacggcgagcattagcggtgataatactgataaaccggatacaccaagccaagaggtcaaggtttctccgaaagatccagttctgaagtcggaaaagtcagtaaaaaatctcgattcagataaagggaaatatgaagcgggagatacagttgtttacacgattaaaacaagaaatacagtagctgatagtaaagtaactgatcttgtcatctcagataaacttccagccggattgaagtatgtcgaaggcagcttgaaagcgagcaacggtggagaagcaaccatcaaggacggcaaaatcacagctaactttggtgacgtgactgataccgagtggcgtagtgtgacattccaagcgaaaattgagtccggatatgcggaaaaaacaattaaaaacgtggcaaccgttgacggcggcaatatcgacacaccagatacaccgggaacagacatgaaagttgatcctaaggaaccaaaactagaatcaaagaaaacagcctccattaaggaaaaagctgatggaaataaagatgaggaccatccggaatctggcgacacgcttctttacacaatccaaacccggaacacggttgatgacagccttgtcaaagatcttgtcatctcggattctcttccggaaggattagaatatgttacaggaacattgaaagtggatggtacagcagtaagtgatgatcaagacgatgatcatggatattatgccgatggtaagacgtcaggagagtttggcaatgtgaccgatacgaaatggcactctgtaacatttgaagcaaaactgaagtctggtcaagcaggtaaagatatcgtcaacactgcaaacatcagcagtgacaatatcaagacccctgacaaaccgagccatgaagtgaaggtatatccgcgaaatcctgttttagaatctgaaaaaacagtgaagaacttggattcagataaggaaaagtatgaagcaggggatacggtagtctacaccattaaaacccgaaatacagtatccgacggtaaagtagaaaacctggtgatttcagatgatcttccagccggattgaagtatgtcgaaggcagcttgaaagcgagcaacggcggagaagcaacaatcaaggatggcaagattactgctaactttggtgatgtcactgatactgagtggcatactgtgacattccaagcgaaaattgagtctggatatgaaggcaaaaccattacaaacgtggcaactgtaaatggcagcagtattgataagcctgataaaccgaaagcagagatgaatgttgtatcgaaaggttccgagaaaccaaatgaacctgctaagccaagcaaaccaacgtcagagccaagcaaaccaacacccgaaaaaacagatggaaagacaaatacaggaaaagaacttccaaatacagcaacaaatacgtataatctgatccttgttggtttggtattgttagtagcaggaactgcactttggtactttagaagaaaaagaaatgcctgatgttgcatgaagaaatatcttcctatattcatcattattgccggactcgtttttacaggttacggagtctggaaagtgatggacatcagtcataaaacagaacaaactttagatgaggcaaaacttgcattaaagagtccttctggaaaaaatgaaggctcagataaagaaggatttaagcctaagttcggagaggcagttggcattctggagattcctaaaattaacgcagagcttccgatagtagagggaaccgatgcggatgatctggaaaaaggagtcggccattacaaaggaagctattatccagatgaaaacggacaaattgttctatcaggccatcgggataccgtcttccgccgaacaggagaactaaaaaaaggtgatcaattaaaggtgaagctgccatatggaagtttttcatatgagatagacaaaacaaagattgtagaccaaaaagatacgtctattattacgctgcagcataacaaagaggagctaattctaacaacttgttacccattttcatatatcggtaatgcaccaaagcggtatattatttatggaaaacggatttgagaaatccagaatatcaaagattaggctgacgaattttcgtcagcttttttaatcatgttctttctgcattctggttcatgttaaatcatagtaatctaggttaatataaaagtattttgtatatttttataagtttactttacttttttataaggtgagtttataatttggttcaagaggtgatggtcatgaagaaagattttggtgattcgatctcaaataaggtttatgaatatcgtgtacttgccagattgtctcagcaagaattagcaaagaaagtcggggtttccaaacaaaccatctttgtaatggagaaaggaaattatgttccgactctgctgttagcttttcgaattgccgaattttttaatgtggatgtaaacgagatttttacttatgagaaaggaaatgatcaaaaatgaaaatgaattcgatcacagatacgatcaccaacgcaattttttcccctttaaagtcctgggctgaacattctccgggaaattggaatattcttattggcagtgggtttgtattgcttgtagtcggattgattctgacattcgtatttactaaaaaaatgggtaagactgacgaaagaacaaaccaaatcgctttaaatggtagcctctgtacgttatgtgcactaattttttgcgacttgcttttcccaaaagaatatatgtggcaagttttcttcttatttaagtattctattgcattcttcgcttcagcaatctatctagccgttcgatataaaaaagattttttgtaaattcaattaccgagaaagatagtgtctctgtagttgtaattgttttaggagagggaacgaatatgaaatcatttaataatgaaatttggagatgtgggaaagtatgggggttttttgctcgccaattattaaccacaattcatacaaaccgttagagatgatgtaaaatgtaatgaaaataagctttcataaccagtgctatggattgactatgttgagggcctagtggggtgaataacccgtaaaggttcaagttctctcggccgcacccccaataataccaagggtttaaccatctttggcgttattcttttgcggaaaatacggcaacaaatgtaccgcattgtggagtccactaaaaaagtgctgacctctgcacaacatcgttgcgcgagtctgcacttttattctgcgattatggggagtttattttaatccgttgttagccgcgccgatacttggcttttagaagctttttttaagtggctaaaaccaacaaattttttgccttcttcatcccataggcggaactttaacgatttaaggcttgttgccagtgtaatggtcggaacgttttgcaatggtttagtgttgttatgcactttttcaagcttatagtttgggactctcgggcttaaatgatgaacatgatgaaaaccgatattgcctgttagccactgcatgacttttggaagcttataaaaagagcttccttcaactgctgcttttacatattcccaatgctcatcttcttcaaaataagaatcctcaaacgtatgctgaatataaaacatccaaattccgagagagcctgatatcataaaaatcggcacctgaaccagcaggaagttttgccagccaatagcccaacataaaagtgctgccaaagcgacgatccccaggttcgttacatacgtattcatccgttctttgcgttttgccccttttcgattaaaacgattggcaatcccgaaaacgtaaatcggcccaataataaacataacaaacggatttctgtacaatcggtacattatttttgtcttagttgaggctttcttatattcctcaaccgtcagtacccaaatatcgcctgtaccgcgtttgtccagattgctgcttgtcgcatgatggacagaatggtcgtgtgcccaatgatcaaaaggatgcagagtcagaattcctgttaatgttccaaggattcgattcgcctttctgttcttaaaaaaggaatagtggcagcaatcatgaaagatgatgaaggttctcactaaaaaacctgccgcaacaacagaaatcgctaatgtaaggaaataagaaatcgacaagctcttatatgccaaacaccataataggaaaaatggtaccaatgtgttaatgatttgacaaatgcttttgtgtaaatcggacttttcataaggtgtaaccagttttctcaaagtccttaggttttgttctttcatattaaaaagtttccccttccctggtgatcttctaagtgtagaaaacgttttatagccttagaaggcccaacgtgatacaccccatatatgataagtatccttcccgattcatctgtgaaattattggaaatgataaactgatttccagtttattattagcagagtcagccgggatacaaaaggcgtatgaagattatacccagcactttattgggtcaaactctctcaatgctcccccatggggatcgatttatttgaccgtgaacattgattgtttgaggaaaaaaggaatgaagtaatgggtatatccatgagtgactgtttggaaacatctgcagaaacaaagttttacaagtgaacagccttgtttttaaaagattatcttgctctttaacaagaaacagctgagctaagtactattaagcaaagaaaaaggtttgaagacactcgtgattcatttttcatggtgttttcaaaccaaagtttttaataggcctcttattctgcactggtatacacatgtttaacaaataatgccatgaataaatcggaaatataatttgcagttatttccgattcctgatataataaagaagaattatttttgttcggtgtaaaggatagtatgaagattgacttttcgtcttgatgatactttgggcaaggatagtatatactgtgtggttacacactaggaggcaacaaaaatggaacaaggtacagttaaatggtttaatgcagaaaaaggttttggttttatcgaacgcgaaaatggagacgatgtattcgtacacttttctgcaatccaaagtgacggattcaaatctttagacgaaggtcaaaaagtatcgttcgacgttgagcaaggtgctcgtggagctcaagctgctaacgttcaaaaagcttaatcttcaatcgtttatacaaacaggctctttatatagggcctgtttttttatgtctatatcatactcaataaaaaaccctactcaacgttcgagtagggagatgctacaaggtatagaaaaagatttaaaacttcaaaggtttgtttacagtataacatactggattgacaatatgcggaatgtatataaattatttaatgttttgttcaaatataactctttcttttttcacgttcgttactttaagtaagattagatgaattataaaaatggtttcatctaaatgttatcaactcgcatatctcttttatgagaagaagataaacaattattattcaatgtggcagtggatataagaaattcttaaaaataatgaggagatcgattgtttttttctcctggaaataatcacttagagatacctaaaacaatgaaagccctacctctcttccatccttacggctccttgtccgtgccagtgtgaatcaggatactaaaaaaagtgactattttattgagttttttggtaaaacttcaatcttcgcagaagaaatgtaaataataaaaatggattagaatgtaggaataacaaaagaggtcgttaatgttctaaacataagttggagaagatttgcttttcatcataatattccgaaatatcttttgggatgtatctaaccaaaactttttatttgtttttcagtgattcctttaattacttccagttcactaatcaaaaattcatatgcattatccagcatttttttttcgcttgcattaagtgctttttctttcttcatacgcattaaatcacgtacaacttcagcaccttcttgtatttcacctgtttttattttgtccgtgtttattttgtacctttgcttccatggcagtaacctatcggattctccatgctgaaaaatgtgcataatgtgttttaatgcaagtatatcggtaactggtcgtatattcgaactcaatattttactcgttggaatcataactgtcatattactgattgacattcttatgacataatactgttgtttttcctctaagaattctttttcttctatggcttcaattatacctgctccgtgcattggataaacaatgttatcgccaatttgaaacatatcatccacctccatatatggtatccttcttaagattaccatatatggaggtgtaatatcaaaattttaataataacatgatcgaatttttgatgtcaataacttttttgaaaaaacagatcaagcaaaaacaatagggaacgtgtcggatttccaatcaggaaaaggtcaattgatccgtgtgagcagtttttcattggctcaatgacatcacagaaatgatttgagtagaaataagaaggaacgatatttgtgaaatgtcagctaaaaatattaaaagtacatgattaagttctaatttctttaccgatttgatatggataacggcccacttacttaatgatgcattttcacttatcttgcgaacagaaaaaggtttgtggatattgaacattttgccaccgagattggcattattatcatggaaattgacaaccttcaaatgggtattgaggtgaaaagaaaaataaagaaaggagagattataaatgaagaccagaacataaagaagtgaaggggaaagaacaaggttaattgaaaagcaaactatataaaatagtttgcttttctttttgttatgaattcacttctttttctttctctttaatgactaataaaacaccgctcagaattaaaaacgaacctatccaaaatgtcccgcctatttgttctccaagcagaatccatccgagtaaggttccaaccagaggctgaaaaaagaaaaagaggcctccacttgaggcatttaataattgtaagcctcggttccacaataaaaaagcacaagcggttgaaacaattcccaaatacaaaagaccacctagaattttagggtcaagcagttgtgatgtaaaaatggtgctaggttttacaaaaggagttagcgccacaatggcaacaaaagttgaatatgttgtaacaagtattggtgaataactgcttggaacgcgtttgatcagcactgacataagtgcccatgtaagggctgcaacaagcagagaaataccgccaagctgatgagatgtatcaatatgtccgtttcccacaataaagaatacacctatggtcgctaaaataattgaggttccttttttgatagtcaatggttctttaagtaatagacgagcaaaaataaccatgaacgctggtgtggaggacgtaataattgctcccatttgtgctgaagacaacatcgttccatattcttgtgtaacaattgaaatggtgttgccaacaattccaatggccacaattaataaaagatcgcgcttatgaattttccaagattgtttccttattaaaccaacaataagaagcgcaaggatggcgatgacatacctggtccaaaccaattcaaaaggcggaatcactgcgacaacaaccttaaccacaacatacatgccaccccagatactagcggctaaagctaaatatatagaacctaacagggtatttttcatttttttgttccctccgtatttaaaattaggtcaataaatgccctaacggagagaagtagtcactttactccattaagggcggagaagtgctactggaacatcattttcaaatagtggagctaaaaacatgttatgatcacctcgatttttaagaatgactatcattatacaatgttggttataaagccgtaaacaccttaaggggactccatttattaatagaataaactttatgaattcatttttttgtatgataatggcgtcatattcatcgcttgttgaaatttacttatgaaataactggtactgttaaatccaacttgataagacacttctgtcacattggattcagggtgttgcagtaataataagcttttttgaattctataatccattacataacgtaatggcgtcttattcagcattcgtttaaaataacggcagcactcagaacggctcagttggccagcttttgcaatgtcctctaatgtgattttttcagcataatggagatggatccagtttaacatttgtttcattcgatgactttttatcatttcagattgatcgtactctaattgaaaaccattaacgaccatgtttttccacattaacgttaattgcatcgtaatgtcaatctcatagagcgatgtcttttgttgaatcaattgatttatttttttaacagcatctagaatattttttgcccactgttgatttccatccaaaaataaatagggcaaattggttgaaaacatatagggctgaacatagcttgaatacagttcctgagataaaacgaaatggggtgacacatttaaacaaatatacgtacaatccgagccttccttttcttctgccatgtgcaggcagccgctattgataaataatccatccccttcgtgaacctctattttttcttcatttatttgaaagagagctattccttttagtatcaaaacaaattggatttcatcatgccaatgaagcggaatatagccatttatattttgattgatccttgtcttgtaacaggcaactggtaattctaccgttcggtgctctgttaattcttttaaattttgatcgatcacaaaattcttcattctgacttctcacctcaatatatttatattttttcattcgatttgagtattttttatcctattttgcatttattataacactattattatatttattagtgaggagtcatgtatgaatacttccaatagaagaatgggattgttctatgttataacaggggcgacatgttggggaattggaggcacagtagccaaaaaactttttcaagaatatcaaatcgatgtcaattggcttgtaacgacacgcttgcttacggctggaatgttacttttaatgctgcaactgttcagaaaggaccggtctcaggttattgaggtttggaaaaacaaagcgtcggctggccagcttctaatttttggcctattgggaatgcttgctgtgcagtacacatatatggcatccattcaacatgggaatgctgccgttgctacattattgcaatatttatccccagtaatcgtcattatctacacgcttttgcgaaaacaaacggttcttaccaaacaagatatcattactgttgtacttgctttagtgggttgcttttttttgttaacaaatggttcaatatctcaactttcagtgccggcagctgcagtagtatggggagttttatcaggattcgcggcagctttttatactttatatgccgttggtttattaaataaatttgattctcttgtcgttgtaggttgggctatgattattggcggttttgcattgggttttatccatccgccatggcaactggattttcaacgattaactgctgaggcgtatgcatatattttatttgtgatattatttggaacaatgattgcgttctggttcttcataaaaagcttggaaagcctttctcccaaagaaacaagcctattaggcagtttagaacctctatcagctgttgtaacaactgtcgtttggttaaaagcgccatttggttcttttcaatggattggtgctatttgtattatagggataactttaatattggctttacataaagagccttctatggagagtgaaaaatcgatattaaagattaggaatcatgcaaatcgggatatataggggctttttttgcttacatgaccggtccgacaatgaaaaacactggtggagtttgagccctctcggcaatatcaaaaagaccaagggttttgacgcccttggtattttttcttcaagaaccttcaatttttcttttttgtaattggtatccaaatttcacttttaaaagatggtgatgttacatccttatgctcgttccacaatatttctggaccttctatttgttcgtaatttgacgatggaaaccattcggaataaatacgtccccatacttcttgcagtgtatccggaaatggcccgattgattcgaatacagcccacgttgaggcaggaacttcaagccgtgagaaattatctggacactgtttcgttgtggctgcgccaatatagtgatcaagctctcctttttcctctgcccgaccttcagaaaaattggtggatgcactaatgagtcctgatggtgctacattagaaagctcttttagtttatttattgctttttcatctaaactttcccacatagatgcaatttccggattaattcctttgaaaataatatgaactctttttttaatgccaacgatgcgaaatgcctctttttcttcaatacggtagttcatttcatttcctcctttaattgttagctggaaggtcattcgtggataagctttaagggaatggccattaagtctggcttttgatgggtttatgccatgtaaattttggaatgcccgtgcaaaagaatcaggtgagttataaccgtactttattgcaatatcaatcacttttacattgctgtctttcagttcaaaagctgcaagagtaagacgtctgcgacgaatatattccgataatgaaatacctgcaaggaaggaaaacatccttttaaaatgatattcagagcagaaagcaagctttgctgcctcttgaaaatcaatatcattagtgaggttttcttcaatatactttaacgccctattcatacttttaagcaaatccatttatttggcctcctttaaccaaagaataacaggagtgaaatgtatatatccgacattctgtgcacagttttgcaggatgacttagatgaaataaagtaagtgattcacttgtatttgtacaggttttattgaagcatgctgttcataaaaaggcatcaataaaagaaagttataattgtcttataaacggcacattcatataattgagtgaaaaaggatgcgtatcatgcctatcaattcttttgaaaactatccgatgagctggaagccatcgattgataaagctgaaaagcctatttataaagcacttgcagggcaattggaacaggatattttaaacggagttttattacctggaacaaaacttcctccgcagcgagaattggctgattatttagatttaaatgtgagtacgatttccaaagcatttaaagtgtgtgagttaaaggggctgctgagtgcgactgtagggagcggcacatttgtatcgtatgatgcgttgtcgaatgcgtatttacttgaggatacaaagccgacacatttaattgaaatgggagcaatacttccagatcacgcttcatatgagcccttgttacaccaactgaaaaacatgattcaggaggaggattatgaaaaatggtttagctacggccgggcaggcgaaagcctttggcaaaaagatgcagctgtaaagctcatccaaagaggcggatttgaaacatccgttgatcacattttatttgcaaatggagggcaaaatgcgattgctgcgacattggcgagtctttgtaagcctggagaccgcatcggtgttgaccatcatacgtaccctggattaaaaactgttgcatcattgcttagtgtgcaaatcgtaccgataaaatcagaaaacgatgaaatgagtccggagtcacttgaatatgcgtgtaaaaacgaaaatattaaaggtttgtatttaatcccggattatcataatccgacgacttcctttatgtctgttgagaatcgaagaatggttgcagacattgcaaagaaatataatctatttgttattgaggatgcatcgtaccatcttctcaacaaaaatccgcttccggcactcgcctcattcgcaccgcaacaggttattcatattgcaagtttatcaaaatcgttagcgccaggcctgcgtttggcttatgtagcagtgccgagacaatataaggagccaatatcaaaggcgctttataatttaaatataaccgtttccccgctattagctgaacttactgctcgcacgattgtatcaaatcaatttgaagtcttaattgagagtcatcgtgaacaaaccattcgcagaaatcaactcgtaaaccgatatgttgcgggatatacatgtttaggtgttgaaacaggcatttttcgttggttgttgttaccgggtaaaatgtctggtgccgaatttgaagaattggctgctcgacatggcgtgcaagtgtatgcggctgaacgctttgtagtgggaaatagttgtcctgaaagggctgtaagggtttctgtctgtgcaccaaaaacacttgaagagcttgaacaaggattaatgatcctgagacgtttgctagacgatcttacctaatattgtttgccatacaattatgacattgtatggcttttttgtgcgtgttatgatgatccacatctagagggaggtttatacaaaattggcttttagaaaggaaggtcagatgatgttagacaaggacagcgtaaaagcaatagatgttcaaactgcttcattacaaagctacatcagttcaccagaaaaacaaaaatcgttatacaagcgtacactattcgttgtgagtatctcacaaatttttggcggtgcggggctggcggcaggagtgactgtcggtgcgcttattgcacagcaaatgcttggcactgatgcgtttgctggtctgccttctgcgttatttactttagggtcagcaggatctgcattaattgttggaagactttctcaacgttatggccgtcgaacaggtctttcggctggctttatgattggcggacttggagcaataggcgttattatggcagcaatcataaatagtattttcttgttatttatttcgttgcttatttacggtgcaggtacagccactaatttacaggcccgttatgctggtacagacttagcaaatcataagcagcgagcgactgctgttagtattacgatggtttttactacatttggcgcagtggcaggtccaagcttagtgaatgtgatgggggatttcgctctttctattggtgttccatcacttgctggccctttcattttagccgcagcagcatatattttagcaggtgtggtccttttcattatgcttcgtccagatccattagttatagcaagaacaatagaagcggcaaatgaagagcctggtgataaaggacatttggcggcaactgagcatacagaaaacaaaaaagggataatcgttggggcaacagttatggttcttacccaaatagtaatggtagctattatgacaatgacaccggttcatatgagacatcatgggcatgacttgggggcagtagggcttgttattggttttcatataggtgctatgtatctcccttcactggttacaggtgttcttgtagataggttgggacgtaccgcaatggctatttcctctggaacaacgttgcttttggcaggtgtaatagcagcatttgctccgggagattctatggttcttctcgtcattgctctttctttactcggattagggtggaattttggtttgataagcgggactgcccttattgtagattcaactgatagtgccacacgagctaaaacgcaggggacagtggatgttctgattgcgttgtcaggagctgctggcggagcattatctggaatgattgtggcagggtcaagttacctggcattatcatttactggagggatgttgtccttattactcattccagtggtggtatggtttaggggacgataaaggataggattgtttaatttacattaatttgttatattgttagataaagtctattgcgtcgtctaataatctaactaactatagttgctccattaaatctaaatcagcaattttggtataaagatttgtgaccaggattccttatagctgtgtcactcactgcatattctttaattgaatcacataaaatggttatcggatttgaaaaaggcaggattactcgctttaggtaaaggagtcatcacgttgttaaaaaggttttctcttgtttttgttacactaatgatgtctatcgttgttgttttagcggccgctaaagagtcgcctggagattatgtcatctcatttgatgaacctattatcttgatgatctcaattggaatcgttgtatttttatttatccctccattagtcatgtccttttttggcaatttggttgtaagaataatatctggtgtataccaatgttttatcgttttcacttttctggggctcattccaattggatttcttattcccaatggctttttgacaattctagtttctattgcaggaactttagtcagtatagctagtgttgccgtaaccttatgcattggcaagaataaaaaagatatataataattgaattgttattttttcagattgtcagtgaaatagtaaaacaagatgagaaggctttgtgggccttcttttttttgttgttgcatcatccccactttaagcttaatctattgaataataagagaaggaacctatagaagaataaaataaataacgagatgtcaaaaataaaactggacttcattattatcaattcacgtaaatgtaaaaagcttggaaagaggggaattctttcatgacaaatagcagaacgaatccgaaggttgatgaatttttaagtaaagcgaaaaagtggaaggaagaatttgagaagttgagaaccatcattcttgactgtgagctgactgaagattttaagtggatgcatccttgttacacatacaataataaaaatgtcgttttaatacatgggtttaaagaatattgtgcgcttctgtttcacaaaggcgccttattacaggataccgatggaattctcattcaacaaacggagaatgtacaggcggcgcgccagattcggtttacaaatgttcaggaaataaatgagctagaaaacattttgaaagcctatattcacgaagccattgaagttgaaaaagccggtttgaaagtggaagttaacaaaaatattgaattgaacattcctgaagaacttcaaaataaattcgatgaaatccctgcattgaaaattgcttttgaagctttgaccccgggacggcaaagagcgtacactctttatttttctcaagccaaacaatccaaaacccgagaatcgagagtcgaaaaatatgtgcaaaaaattctcgatggaaagggattaaaggattaggcacgccaaggttcaggctaaaggaatatcatcatagcgtaataagatcctttctatagaagaaaaacaagcatagtaagatgcttgtttttttcttaggacaacattcacttactgctgaaatgcttctaacattgtatgccactagacagcgttataaaatattaatgcaacacctagaaatagctcaatggtacggctcatcacatttagaatgcctaggagaactaatagaaccggaagatttttagcaagttactacactccaaactttgtttttgtattaatataccttattaaccattgtttttagtcaggtgcagacaaacgaatactgattaatgaatcatcatgatatcaatgagccgtttgattttttcatcgtcgcctgtatcaacgtacactgtttttctgttttttatgatactctcagtcacttccctcatgacgcctttttctatatcatcagcggaatcccagcgtaaaggcacattatatacatgaattgtgccatccccattgccatgataagtgactgatccatccactaaacgagaacctgccaactgggtcacattttctggatagctggcacttgtatcatcattaggattaattggctcgccagccgaaatatgtcgaacattcaattcatctatctcttgattaggtccaagttgaagccaaactctggcatattcaattttttccgaagagtatgctgccaatacattgtcttctttgcttttctcctctgctgaagaggtatcatttgcagcttttgttgcggattcttctgattctgttattggctccgcttcatccttgcgtattttggtgctgtcttcagtctcagtgtgtttttcgtcagtttgtacagcagaagcttgatttgaaggttgttgtgcttcttcatccttactgcccgtacatccagcaagcaaaatcatgagcagcagggcagtattgcaatagcatatcattctgcatttcttcattttttcattcctctccattaactcaggtcagcttcatatataagtttatgtatctaaatattaccatggaatagataggatgatgttgaaaactgtttaagaagaggaaacgatcttgaatagcatcgcgaaaacttaagaattcttaagaagttttgcccctttttcttcaggttttgaatgtaaagtgggatataaatgcaaaacaaatggagagattagatatgaaacgtctgttattcttatttcagtatatagtgaatccgagaactgttggtgcgatccttcctagttcaaggtatcttggagataaaatggtggatggaattgatttcaagaaggctgcatacattgtcgaatacggtccgggtacgggtgtattcacaaaaaaactgcttgaaaaaagaagacctgaaacgactattttattagtggagcaaaatgaagaattttatttactattgaaagagacatttaaagacgaaaagaatgtatttattgtaaatggatctgctgaaaatagcagccagtatgcaaagaattatggtatgccttatatagactatgtgatttctggccttccctttgcaagcttgccaaaaactgtttcagccaacattttattagataccgcaaagattttaaaaagagatggtgaattcattacttttcaatacactatgttgaaaaaaccgttttttgaacagttttttaccaaaatagatgtaaaaagagagcttagaaatgtaccgccggcttatgtctttagctgctcgatgccgcaaaatgatttggaggaattatatggagtcgaacgttcttattgttgatgatgacaaagacattagaaatctcatctctgtttatttagaaaatgaaggcctgtacactcaaaaggctaaagacgcaatcgaagctttaaacctgctggaacaaaaagaatttgacctgatgattttggatattatgatgcccaacatggatggtattgaagcatgtatgaagattaggcaagaacgaaatctgcctattatcatgctttctgcaaaatctgaggatatggataaaattcagggacttgccgctggtgccgatgattatttatcaaaaccgtttaacccattagaattaatcgctagggttaaatctcagttaagaagatataaaaaatacaatactgatacaagcagcacgaagaacatcattgaaattggtgacttgaccgtaaatacagatacacggcaagtatgggtgcggggccgggaagtcaggctgaccccaaaagaatttgatatactcgaacttctttgcatgaacaaaggaatggttctgagtgtggagaagatatatgaagcagtatggaaggaagacttttttaagtcggacaacactgtcatggtccacattacaaaaatcagagataaaatagaagaggattccaaacatcctatttacatcaaaactgtttggggaacgggatataaaatatgagaaagtttggaaataagctggttgcaaagcttcttggcgcgattgcaattagttttcttgtttcattgggtatgatggcactcattatattatcgaacgtctatctacaaaagatgaattatctcaaagagtttagcatccggagcagctattttatgatactgcttcagttttcggcagctattcttacttttattgcagttttttttatcatggcacggaaaaaaatattatatttgaagcttattactgagagtgttcatcatattgctaatgggaaattaggcttgaccattaggattgaaagtagggatgaattgacccagcttgcccaaaacattaatgatatgtccaaagagttagaaaaaaagtttgaacacgaaagacaattagaaaggtcgaaaagtgaactgatttcaaatgtatcccatgatttaagaacaccattaacatcaattatcggatatttggatttattaaaaaaagggcaatacgacagtaaagcgcaatttcaggaatatcttcaaacgattgattcgaaatcgcaaagactgaaatacctgattgatgagctgtttgagtatacgcatttatcgagcccggacgttaagttaacctgtaaaaaagctgatttgtcaggtttattggaacaaataataggagaatacattcctatttttgaaaaggaacgactaagtgttcaaaaatcaattgcagaagacaatgtacctgttgtaatggatatagaaaagatggttcgcgtttatgataatctctttatgaatgcgataaaatacagcaggaaaccatctgaattattcataagccttgagatcattggtgacaaagcacttttgaaaatttctaatcaagttgagggttttccggctgacaatatagacaaattgtttgaacggtttttcaggggtgataaggcaagaacagatcaacaaggaagcggccttgggctagccatttcaaaaagaattgttgagcttcataatggtaatatccatgcggattatagagagggctggatgagctttattgtcgaacacccattgtgtatataaaagcttatggaggaaagtttccataagcttttttctttagaataaaacttaagaaaccttaagaattttacggagagtttcttcattcttattgcttatcatgtaggtatggaaagtgaggagagtgtagaaattgaaaagtaaatttcttattatagctttgtggtttttagccatttatatagcaaaggaatatcatttactgtcactcgatatggatgatttacaggaatttatatcgttgaacacaaaatacgcaatgctgctgtttattgcgctctggatcattagacttctcttttttattccaggtgtgactctcatgtttttgggggagtatgctttgatccggttgtgagctttatattgtcgatggctggcatttttttgagcgaaaccttggtttacgttttttcaagaatgttttcaagcgggaacatgatgaaggatttagaacgtaaatatccagagttgaaaaaattattggagacttacaattataagtttttggcgctggggatgatttgtccaatagctccaacagatgtcgtttgttttttatcggcagctgtaggaatcaagtataccacttacattttaacggttatcgttacgaatatccctttattgatattttcgagtttcattgtgatcaattttagtgagtcattaatgggaactgtattggttgtcgcatcatttgttttggtttctattgtatccattaaaatgtggaacacccttaagcataaacggagcacatagaaatgccacgagactaaccatttatagcttataagcacctgtagagatttaagttctttcggtatccaatagtaccaagggttaacagcccttggtattattttctgctgcacatatataaaccctccattttcgcttgtagatccttttttatttttgtattttaggttgaatgatcaccagaagaaaaatgaacgcatgatctgaaaagctgttttgccgcaaaataaataacaccccgatgatcaacgataacaatcccgctactacgatatattgtgtgtctgattttgattactgtatataatcgttttttagtaaatgctctttcattttttgtatagccttcgcttcgtcagatccatttgcgtgtatatatattttggttccgggtttaattcctaaagccataatgtccatgatggcttttggcgcttgtttgaggttaacagttttcccttggtattcaagaaaaatatctgatgtaaaccgatgagctagtctgactaacagggtagccggtctcgcaaaccctgtttccttaatgatcgtaaattgtcttttaatcattcttcacctcattacattctgcctcttgacggatttatagttgggttgcagatcaaatttgaatttagagtacctttaggataagtgatctaatttcatcgaaataacactctttctttgtgtttacaaaataattctcaactaactaaaatggacaatgacttcattcgagaaaaaagcatgattcactatcagcttttgtttattattgtaaataaaaacatggtgtgtacaatggttacattcaggcgatttgttgattattcaacattccactctaaattgttgattatcttaagaaagtttggtgaaaagctatgtccaaagtggatagaagaataaccaaaagccaagaggctattaaaatagctctgattgagctgatgactgaaaaaagttttgatcatattacgattaaggaaatttctgaaagggcaaatgtaaaccggggaacaatctatcttcattacttagataaatttgatctattagaaaaaattatggaagagcatataaacaatatgggggatttttgtgagtcggcagctgaaatggactggattgaatcgactgtacactgcatggaataccttgagagtaattatttattcttttcgacgatgttagccagtgaaggcgctcgatattttcgcagtcagttccttaagtttaatatcgaagagttcaggaaagatgtagatgtaacgaaaggcaagaattacggccaaagtgaagatgtcattgttgaatttatagcaaatgcttacgtaggggtagtggaatggtggttaaaaaacgaaatgccttatccgcctcgtgtcatggcagaaaaagtgggggagttattagagcggattttataatggaggcaggaaatgggtgttgacttatttgtctaggcgggagattcaagtctcctcgatcgcatacaaaataccaagggccagcaacccttggtatttttataccttcatgcatttttgaagtttatgcttaaaggtctgccttactttgcaaatcgccgagctgctgcaacgcacatgataacggcgatattcactgctacgagtgcccagcccactttctcgtgcagaatcactgaggcaagcagcagcccaaaaaaaggctggagaagctggagctgcccaaccgccgcaattcctccttgggcaagacctcgataccagaacacaaagccgatcagcatgctgaataaggatacatatgcaagactgagcagtgcgggaacgccgatgtccgaccatgagtccggcgtaaaaaagaacgacaagggcagcataagaggaagcgacagaacgagtgcccatgagatcacctgccaattccccagacgccgtgaaagccttgccccttctgcataaccgagaccgcatacgacaatagaagccagcatgtacgcgtcgccaagcggggatgaacctcccccctgaatgagggcgaaacctgctactaacaagctgccaacggttgagaaaatccagaagacggggcgagggcgttcacccccgcgcagtacgccgaagaccgccgttgcaagcggaagaagtccaatgaagacaatggcgtgtgcggaagtgacatgctgaagcgctaaagctgtcagcaacgggaaaccaatcactacgccaaacgctaccactaataatgaaatgaggtctcttttggcaggatgctgctgccggaagatgagaaggagacctcccgccagtacaccagctatcgcagcgcggcaaacggtgagaaaaaacgggtcgaagtctgacacagccaaacgggtcgcaggcagcgagccgctgaaaatgagtacgcctataaaaccatttatccagccatttgttgttttgttcattataatcactccacatatctttcttgttcattgtctgtattttcttaacaaaaccagcagctaaggattacaatgactataaactggaattggccttttttaaacggccagttttcataaaaaaatgcataccagttaggagaacaacgtgcaaatggatatcacgccttttttgaatagaactctggatattccgctttatcagcagctttatcggtattttaaagaaaatatgcatcggggccgtattcaaaaaggaatgaagcttccttcaaaaagactcctggcgaatcagctttccatcagccaaacgactgtagaacgtgcctatgaacagctcgctgctgaaggttatattgtgagcaagccaagaagcgggtggtttgctgattatcatgattctgattttgcttatgatagaatgccaagcacaacacccattcaacaagaagcagaagaaaataaacaatggattgattttcattatggaaatgtagattcttcttacttccctttttccgcatggcgaaaaagcatggtcaatagcttagaccaatatggacacgagctttatcggccgggacatgttttaggagagtttgagctgagaacactcattgcagagtacctgtatcaatctcggggtgttcattgcggccctgaacaagtgattataggtgccgggaaccctattctgctgcaaatcttgtgccaagtttttgagccgaatatttctatagggtatgaggatcctggttatccaagagcacgcaagatttttgaagccaaccgcatgaatattgttcctataccagtcgatgctgaaggaatctgtatacagaagatcaaagaacagcagccaaaccttgtatatgtcacaccttcccatcaatttacgctgggaacaatcatgacgatcaacagaagaattcagctgctcaaatgggcggccgaacatcaatcctttatcatagaggatgattatgacggggaatttaggtacacaggacagccggttccttctcttcaagggcttgatcagcataaccgtgtcatttatatgggcactttttctaagtctcttttgccctcgctgcgtatcagctatatgattcttccttcacctcttttaaaaaaggggcatgaaatcacatccttatataagcaaacagtgtcctgccacagtcagctaaccctagctgaatttataaaaaatggagagtggcaaaaacacatcaacagaatgagaaaactttaccgcaaaaaaagagccattgtattagaggcagtgcaaagggaattaggagagcatgtcagaattcgcggagaaaactctgggcttcgtatcttacttgacgtttatttgccatttggcgaaaaagagttaattgagaaggcgaaaaaacatggagtaaaaatttatcctgtttctctttcttatcaacatcatcctcctgcaaaaacggtctcgctcgggtttgcaggggtttctgaatccgacataagagaaggcataaaaaaactgaaggctgcctggaagatatgagggagctttcagtttagcaaaaaggccaagtgacgactaagtgttgagagctgttcaatattatttaagtatatgatgagtgcctgcagtccaggccacgatacgtctgtttagcgaaaaacagaattttttatttgctcctcacagtgctaaaataaacaaaatagacaattgaaaaaatagaggtgtaagaatgaagttagatgagtttacaattggccaggtcttcaaaacgaaatcattaaaagtatcaaaagatgatattatgcggtttgcgggtgaatttgaccctcagtatatgcatgtagatgaagaaaaagcgaataaaggcagatttaatggaattatcgcttccggcatacaaacactggccatatcttttaaactttggattgaagaaggtttctatggagacgatattatagccggaacagagatgaatcatatgacattcataaaacctgtatatccggatgatgaattgtttacaattgttgaggttcttgataagcagccaaagagaaatgaattgggaatactcacagtattgctatctacttataatcaaaaagaagtaaaagtgtttgaaggtgagttatctgtattgatcaaacgataactcagaaagcccgcttttcgcgggctcgattgaagcagatgggggaaagatgttagcgagtttcctttgaaaaataagaggttaaaacatcataaacaataggcaaagaagtaaatccctcatcttctagaaaatgacctccgtgctgaacttcatataacgcagcatcaatttgttgtgccagatccttgctgaatgaaaaaggcacaatttggtcgtccttagaagcaatgacagcacggtgcttcgcggactcaatgattgtttgatgatcaaacgatccctgtgtaaattcatctaacatctttaaagtgggcaatgatttggcaaagccggaaacaagtatgattccgccaagctgttttcgtaattgaagatgttccaaaaatctcaaaatggcggggcaacctaagctgtgcgcaaccaaatacgtattttcatgtaaagtgtgctgatataaagagagtgtatccagccaatcctcaagtcttggctggagcggattaggcatgtttaaaatgtctgcttggaccccatctgcgagcagacgttttttcagccaagggaaccaatgatttgttgaggaggctctgtagccatgaatgatatagacttgttttgtcattatttcctcctaagaaatattttcattcagtataaaattcctctcattgggaaacaagtacgcacttttttgtaagtagctttacatatgaggccctccttgtgccattccccacttacacatctcatctatgaggggatacaaagatcgccctctgtcagataacgaatactctactttcagtggggtttgagaaacctcagaccgatgaataaggccgtcagtttgcaattccttaagctgtgcgcttaacattttatgggtgatgaagggcatagcccttttcagctcgccgtatctcatcgttttttcactaccctaactcatagagaattctcattttccatttgccccctataagagataaggtgtattcaaatggggcttgtttactgcggcacaggctattcattgtaatcaaacctccttttttaagtatcatatcagaataaattaggattttcggtgttgaagtttgagggcgattcacgatctgaagtgaaaggggccgcttgctcaacaggcggcacggtacatgaatgttctaagtcaaagagggttaccttactgttagttactttatttaaaaaaacgcatgtttttagctgaaaatatctattatggtatatttaaatataaagaaatatttgagaaatgaggaatggtatgaatacacccaaaaaacataagaaatttaaagcgaaaatgattctccaaatcatcatggttatcattggaggaatcatagcggcatatggactagaaacagtgctcattccaaacagtgtatctgatggaggggtgacgggtcttagcatcgttggttcacagctattcaacttgccgctggggattttgattgcagtgatcaacattccatttgtctggttaggatataagcaaattgggaaaagctttgcattattatcaattatcggaatcgtatcgcttgccgcggggacaagctttttccaccacacacccgccatcatagaaggagataccctgttaattaccgttgtcggcgggattatccttggattcggaatggggctggcgctgcgtaatggcggcgcattagatggaattgacatgcttgctgtgctgctatcccgaaaactgccattcggaacgagcgatctcattctattcttaaacctatttgtgtttatctttgtttccacagtatttggcttacaaggggcattgctttcagtcattgcttactacattgcatccaaagtgattcatgttgtggaggaaggcttaagcggctctaaaacctttcaaattattacaacccaacctgaattaatggtagagacaatacgtgatcaattaggccgaagcgccacatataaagaagcttacgggggtttttcccacgagaaatttaaagaaatcacatgtgtcatcaaccgtttagaagaaaccaaactaaaggaaattattaatgatattgataaatccgcctttgtcaccgtatatgacgtagctgaagtgaagggcagcaattttagaaatcttaatcatcactaaaaaatagaatgacctttttaaccgtaactgacatgccgcgggtaatttaatcaaaaacacttttttgagggcttgtgggtgtcaccagtgaaggtctgaatcataaaaataccaagggaatcaaaacccttggtattttttctggttattagattttatcttcagctttacgtgctgcttcgagcttatcaatcctgtctttatatttttctccccagtccttcatgtgcaggataacaggttctaatgttcttccaaactcagttaaagagtattcgacttttggagggacctgtttataaacctcgcggtgaatcacgccatcccgttccaattctcttaattgcagcgtgagcatacgctgggtaattttggggtatagttttcgaaactcattaaacctttttttaccgtcaatgagatgataaagaagaatgcctttccacttacctccgatgatatctaatgttgtctccaccggacatccttcaaagtcatcagaagaataatcaatgccgagtttacgatttctcaagctgttcactcctaatagtatactttttgatactatatacattcaatgtgcgtactttttatatattaatatacatcatataatgatgtcacatctaaggaatgaaaggaatggatcatatgaaaacactcgtactcgttgtacatccgaatatagaatcctctcgtatcaataaaaagtggaaagaagccgttttaagtgaaccagatgtaactgtccatgatctttatgaaaaatatcgcgatcaaccaattgatgtggaatttgaacaacagcagctcctggcccatgaccgtatcgtttttcagtttccattatactggtacagcagcccaccgcttttaaaacagtggtttgatgaagtgtttacgtttggctgggctcatggtcccggcggaaataaattgaaggggaaagagtgggtaactgccatgtccatcggttcacctgaacactcttatcaagccggcggatataacttgttttcgataagcgagctgacaaaaccgttccaagcatctgcccatttagtaggcatgacctatctgccttcctttgccgaatatcgcgccaatacaatcagtgaccaagaaattgccgaaagtgcgaatcggtatgtaaagcatattacaaatatagaattaaacccgaaggttcgcctgcaaagatatttgaaacagctggagggtgtcgatttaacataaagattgattttggaaaatcctgtactcaccaagcaggattttttcttgttcagcagagggattttaacatatagcgaaaaaagaagaagccaccaaaaataagctatttgcttggtcctgactgcttatttttggtgatatacttatttctctgtgatgaaataaagcaaagcgatgaccggaaaagcgattccaatccataatgctgtactccatccccctgaggcatatgcccatcctccaattgatgaccctatcgcaccgcctagaaagaagatcgccatgaataatccgtttaatcgactgcgaatttcaggcgccaacgaaaaaatagcacgttgactgagcacaaggtttgcagatacacccatatctaacagaatagctgcggccactagaactgttataccgacgggggagctgctctgaatcatgaggggtaataataaagagacaacgacaacaacgagagcgattccagtggcaagcctggttaagcctcgatcagccaggcggccgcctattggtgcagcgactgcacccgcaatgcccaccaatgcgtagagtgctattgccttctgagaaaaatgaaaatcaggaccggccaataataaaggaacggtagtccagaacaagctgaaagctccaaatacaaacgcatgatagatggcacggcggcgtaagattggagtcgtgcgcagcagcttccacattgaaccgagtaaggcagtatagtttgtatttgctgttggttttctggcaggaagcacttttgataatacgatggccaggataacacttaccacggcggacaaagcgaatattgcattccacccccagatatcagcgactagactagatatcggacgggaaagcataatccgagtaataagccgctcatgacattgccaacaacccggccgcgtgcagcgtctgatgcaaggtatgatgcaaatggaacaagcacttgggctgcgattgatcccaatccgacgaaaaacgcagctgctaaaaacagtgttccatgcttcacaaatgctgttagtgtcaaagccgctgcgcttagaaggagcgatacaacaataagttttttgttttcgataatatctcctaaagggacaaggaatagtaagccggcaacgtatccgatttgggtgagtgtgacaatcaatccagcaccgcttggagaaagtccaattgccttactaattaatccgaccaagggttgtgcatagtaaagattagcaacaatgataccgcatgcagttgcgagaagaagggttaaactgggtgaaatcctctgacctgcttgtttgtttccattagccatatgaatgaactcctttttaagtggttttttgagtgtaatcatgacttctcacaagtgattttataaactgaacgttcagtttcgtcgattaataaaaataatatactaaacgttcagttttgtaaatggatttctgttttctttttttattcaatttaagtatactgaacgtatagtttatattgcgggaaggaatgatttatgtgcagagtaaacgagggcggccgcgtgatgaaggaacgcataaggcgattctctctgcagcctatgacctattgctggaaaaaggcttcgatgcggtgacagtcgataaaattgccgagcgtgcgaaagtgagtaaagcaacgatttataaatggtggtctaacaaggctgccgttatcatggacagctttctttcgaccgcgacggacaggctgcctgtgcctgatacagggtcgtcagtacaagatatagtaacccacgccacgaatttagctaggtttttgacaagccgggaaggaaccgttattaaggaattaataggtgcagggcagttggatgaaaaattggcagaagaatatcgcacgcgatttttccagcctcgccgcctccaagcgaaaggccttctagaaaagggaattcagaaaggtgaattgagagagaatcttgatattgaagtaagcatagatctcatttacggaccaattttctatcgtctgcttataacaggggatgaggtgaatgattcctatgtgcatgatttggtgatgaacgcgtttaagggagttcaagctacctctgctacagagagtatgtagctgataagaactgcaaaagctgcggattatatgacaaattggttccatcgtacgtgaaatataagatttttgttgctgagcggaatcgagggaaaagttctcttatcggatgtcgaaaaagaagtcattcaatcgtgaatacataacatcatattattacattccttttcatcgattggaacaagggttctatacttcaatggaatatcgcaaagttggagtatttaaacaacaggggaaaatcgatggccattatgtaggtgtcatggcaatcgaaaaaatacttgcaatgtaaacaggcctctaaagagacctgttttttaatatccagatgattgtctagtttcagcttgggctctatgactactcccataactgaaatagtctaatatttataccggaatatttgatgttccaaatataagggattgtttatataaataaaagtttatataatgacgggggcgctaaggaaacgcggggagcgactcaggttttgttcgaagttttgatccttaagatatacggagcgctacatatggaaacgtaaaggggaatgtagaatcatttggcgtgtatataatgatttgcttatatattgatttgggaaggaggagctcatatgacgattgatgttgcggcgatgactcgttgtttgaaaacgcttagtgatcaaactaggcttataatgatgagattatttcttgaaaaagaatattgtgtctgtcaattggttgatatgttcgaaatgagccagcccgccataagccagcatttgcggaaattaaaaaacgcaggttttgtgaatgaggacagaagaggccaatggcgttattattcaataaatggttcctgtcctgagtttgatacattgcaattgatcttacatcaaattgatcaggaggatgaattgttaaaccatatcaaacaaaagaaaactcaagcgtgttgccagtaaggaggcattagattgacatcaatgattttggcagtattcatctttttattaactctagtattggtcatatggcagccgaaaaatttatctatagggtggtcagcctgtggaggcgcagttttagctctaatagcaggtgttgtcaattttcatgatgtgttaactgtgacagggattgtttggaatgcgaccttggcttttgtggccatcatactgatatcgttaattcttgataatatcggtttctttgaatgggcagcgcttcatatggctaaggctgcaaaaggaaacggtgtgcggatgttcgtttatgtatctctattaggagctatcgtcgccgcgttatttgcaaatgacggtgcagctcttatattgacaccaatcgtattagcgatggtcagagcattacattttaatgaaaaattagtttttccttttatcattgccagcggatttattgcggataccacttcgcttcctttagtagtgagcaatttggtcaacattgtttcagcggactattttcatattacgtttattgattatgcatccagaatggttgtgccgtacttgttttcgctgctggcgagcatcattgtactttaccttttctttagaaaaagcataccaagacgctatgatctgactgaggttaaaaaacctgttgaagcaattaaagatcaaaacatgttcagactgtcatggtatatcttagggctgctgttaattggatattttgcaagtgaatttttttctatccctgtatcagtggtagcgggcagcattgcgatcattttcttaatcgctgcgcaaaagagtccggccgtccatacaaagaaagtggtgaaagaggcaccgtgggctatcgtattcttttcaattggcatgtacgttgttgtgtatggtgtccgaaatgccggattaacggatgtcctttcagatgtgattcaagccgcagctgatcaaggattgtttgctgggacaattggaatgggctttattgcggcgattctttcttccgttatgaataacttgccgactgttatgattgacgcattggctattgccggtacagatacacatgggatgatgagagaagcgcttatttatgcaaatgtgatcggttcagatttagggcctaaaataacgccgattggttccttggcgacattattatggcttcatgttctttctcacaaaggtatgaagatttcctggggcacgtattttaaaacaggaattatcctcacgatacccactttattgatcacacttgtcggcctgtatatttggctgctgataatccattcttgtttctaaaaggacaaggtcactatatcaaggaaaacaatgcactggtaactcttgacgcagccaaatggctgaagggtgggggagaaaataccttggggctaagtggaatgtgtacagcgcaggaatcgaagctcatggatgacatcgagtgctgttaaagcaatgaaagaagcagggattgatatttcaaatcaaacatcggataaatttgatgatccggcaaaagcacacggaacagaagaagtgtttccaaagggtccgtgatgaaattggtgaccgtttaaaacagtttgctgtaactggagaataaagaatcgatatactcagcgttttcttgggttatataatgcaatgtgttgttcaacaggtgtctgcgggctgagtgcaaacacctgtttttgttttttatttgtctgagattcgtaacagggaagttatttagctggtgacagaggaaaattgattttgtgaacagaatcatgaaggagacggtgttttaaaggagttgtctgttttgcaggaattaacaaaagaaaaatacagtagcttaaaaacaatgtttgatgacaaatattgtcccacatttgtctattcaatattagaccaaaccattccgggagctgtttatgcagatgatcaaacctttcctaaatcgttttttataggaactgaatcaggcatttattttattgcgggagaccaagggaatcgggattttcatgatttcattgcaggatattatgaagaacaagtgaaatcatcaaaacgatttaccttgttttcttccagtgatacatgggatagcgtactgaaacccatactgaaagatgacttaaaccaaatgagaagagctgcattttcttatcaaccaaaatctttcaaaaagactttgcaactgccaaaggggcttgtattgaaaagaattgacgaagacatcatttcacatagcacagcgtttaacagcgcgtattatgaggagtattggaattctgtctcacagtttgcttcaaaaggttttggatttgccgtattacatggcaatcacgtagtaagtgagtgtacctctatatttttagggcataatcgagcggaaatggatatctatacacttgaagaatatagaggactggggttagcttattgcgtagcaaataggtttatagcgttttgtatggaaaatgggattgttcctagctgggattgtgatatttgcaacaattcgtccattgcattagcagctaaactagggtttaagacggtaacggaatacactatttactactctggctaaccttaatgaaagaaccttaaaaggagataccaaccgatgttggtatcttttttgttttagagtttttttacccttttagcagaaaaatgggtgatgaaaatcttattcattttatttacttttaggtaggtaaaacataccccgccaactgtaaccactccgcctagcagagagagcagtgtgggtatctcgccgatccagagccaagatatgatcaaggctaaagccggtgtaacataaagtgaaagggttgcttctgaagcaccgacgagtgaagtgacatatgctagtgcgaagtaaggaataaccgtcggcaataatcctaagtaaacgatagacaaagttgcgcttattgaagcgttcatcatctcttcgcctaagcctggcagaaacacaagcataggtattgttccgccccaaatggtgaatgtaacgaatggaataaaaccatatttttttatatagcgggcttgaaaaacgaaataaatactctccgaaaatgctgccagcaggatgaccaagataccgctcattgaatatgtaaagtctcccgccccaaatgcaatcaataatacacccaataaactgatcatagagccaagccatttcgtaaatccaaaatgctctttataaaacaggcgggatagcatggctgagaagatcggtgccgtagtaacgagtaagcttgcaactccggcactaactgttttttcaccgatgttcagcaaaatgtgatagaatgcaaatcctaaaaaccctaaaagaaaaatggcaggaatgtctttcaagtcgggtaggcgcatctgagtcaaaacagcaaaaagcaataatgccatagagccgattaacaaacgaaataaagcaaggtgttctggcgtgtacccttcaagtcctgcgcgaattcccggaaaagcagatgcccataaaccaatcatgagactatgagatatcattatttgaactgttttctttcgcattcctctcactcctctttacaaaaaccaaccagttatttaatgtgtttctatactaataaagatttgatgatatggcttcaaccagttcaatagattttgacccaaccaatttattttaaggagaccgattctatgagctttccagaagaaaaaaagatgaaaaagctccctaagtacagacaaatcgttcattttattaaagagaaaataggaaatggagagtggccgattggaagcaagattccaagccagcgcacgcttgcaaaagattttcaggtaaatcggagcacagtgattacagcgttagaggaattgatggccgatgggctaatagaaggcacaatggggaaaggcacagttgttatcaacaacacatggacactgatggctaagaattctgctcccgattgggatcaatatgtcacctctggcattcagatgccaagccgaaaaatcgttcaagagataaatcaatcagaatcaaatacagaccttatacagctcagtaaaggtgaactttcagctgagatttttcctttggctgttatgaaagagatgatggggaaggtatctcaacacatggaggcattcggatatgaagaaccaaaaggttacttacctttgagggaggcattaagcaactatttaaaaaccattggaatcaacgtctcatcttcttccattctgattgtctcaggagcgttgcaagccttgcagctgatatcaatggggctgttacaaagaggatcaaccgtttatcttgatcagccctcctacctttattcattacacgtatttcaatcagctggtatgaagctgactggacttcctatggataatgaaggacttttgcctgaaaatgttcatttaacaagaggagagcggggaagggctatcttatatacaaatccatgttttcacaatccgactggtattcttatgtctaaaaagcgacgggaagaaatcctagcagtaagtgagaatacacagcttcctattattgaagatgacatttatcgtgagttatggatcgatgaaattccgccatatcctattaaaacaattgataaaaatggacacgtactgtacataggaagtttatcgaaaacattaagcccaggtttgaggattggatggatcgtcggaccggaaccggtgattgaacgtttatctgacattaaaatgcaaacagattacggatccagttcgctatcccagagagtagcggcagagtggtttacttccggccactaccagcagcatgtagaaaaggttaggcagcaattaaaggtgagaagagaattggccttgagtgctttagaaactcatttgaaagaagtggcgacatggaatatcccaaaaggagggttttttgtctggataaaaatattgccttccatatcaatgaaattactttatactaaagccttatcaaaagggattctgatcaatctcggcagtatctatgctcaggaaaaagggaattatattcgcttatcatatgcttatgcatctcttgaagaccttcaaaaggggatttatgagttgggtttaatgattaaagaattggcaagcaggtaacttttatatccttaaatggatgtttcactaaaaaagagatcaagcctaatgatcgcttgatctgataataacaagggttactagaatagaccaaatcatggttcggtcttaaaataatcatgtctctgaacgaaaagtctttccgacttctcttcctaaaccaaagtagtgtctgaaattatagataagcgggctccatttggaagggttgatatggttttcgtccagaatgatactttcctcggcatgaaaatgtagtgcctgcgtctctacaattgcgaatgacgattcatattctggaagccgaatgtgtttcacttcggcttcgatttggatagggcattctttaattcgtgttggtgatactgtttttgattgtaaaggcgttaaccctgctgcctcgtatttttcttttttatatgtaaatccgagctgcttctttaaaggcggtatactcttttttccgctataagatgaaattctttcaacgttttcccataaatccgggccaggcaagtttatgacacactctttgtgtctttccaaattgtcgatggcttttcctcccagtcctactccaaggattatataatgtccaagagcccaagaagaagacataggactaatattagtggttccatcctcattcaatgtggttagaagaaatgtcgaggtaccataatacatgatcttgggtttgatttccttaaatcgacgagtgtcttgttttttgatgtccaacgttttttcctccttgtcacgcttacatttatattgtaaaggattaacatttcaactatcatcgaaatatgaatgtaaggaggaaaatcatgaatcctaatattgcaaaaatctcttcgttgctatcagatccctcgcgttcttccattcttctcagtctgatggatggaaggatacaccctgcgggagagcttgcatatctcgctaacattaaacctcaaactgcaagttttcacctgaataaattgcttgaagcaaagctgattagcgtagagaagcatgggagacatcggtattacagattggctgactcagatgctgcaaatgtgatcgaacaattgcttcatattgcgcctaaagcaaaagtcacatctttaaaagagtcaaaagagaaaaaggacttgcatttcgcccgtacctgttatgatcatttggcaggttatgtgggcgtgcaaatggcacattcattagttgagcaggggatgttaaaaaaagttgatttaaactttgaggtgacttcagagggtgctttattcttttcaaagttaggcatcaatgaagagcaacaacggaataagaggagagcctttgcccgctgctgtttggattggagtgaacggcagcatcatattgcaggagcattaggaaacgccctattggtgcgcatgttagaagaagagtggatcgttcgtatgcctaaaacgagagcgattaggattacacaaagcgggaaaatcgcgtttgaaaagcacctaaacgtgaagatttaggatgttgaagcgaaggcacgatatccaggaggaggagtaagatttgttctaatcttactccttcttcttattttgaagcagctcgattccccattgcaatagagatgcggttccaactgtttatttgattaatgatcagaacaaggtcaacataatgtttttcatcataatgttcccgcacccgatgatatagctcatcaggaacccttttagatggaatgagcgtgatgtgttcagatagttcgagagccgctttctcttcaggtaagtaaaaatcacattcattccaagcatgtaaacagtaaattcgctgttcagtttcccccattttgcgggcatcggacgtatgcatatctatgcagaaggcacagccgttgatttgagagactctgattttgattagttctctcgtcgttcggttaattgaggattgtttcgtgtatttctccatatccatcatgattttcataccttcaggtgcaatctcatagtaggacactctttgactcataaggcaagactcctttccattgaatacctagattgtatcccggtattgatcattttaccaatgtgcggtttgaatgacagctgtttcagcgtcttttggaaagaagtttctttgaataaaaataagggtagccagcaatgatgagtggggctgctaatgcaagcagtatccatgagcctgattggctgtctctagtgactctaatgaatatataagtaccgatcagaaaatataataaagcacctagaaaccaatacatgttcaatcctctttttccttgctttttggttgcgcatttttgtctgtcatatggcttaatcgatcagggttctgattttttaataccttttcggtccggattccttttctctttaatgataaaattgtgagatcaatcgatttcaatgatgatcattccttcaatgaatagtaagttccttatgattttaaaggtaaatttgaaaagataaaacgtacatagaggcagaacgttcatgtacgtttgggcaatgatcacttattggaaactctaatgtttccctgcacctgatattgttgtgttccttctcttcctataaaatgattggatacatgtatgtttgcacgttgaaatatgggttcgattttcatgaatctctattcggtgaaacaggtaaaggaagtggataaggtttgcttataaggaatccttttaaagataaatattactcacatgataggcgggcattaaacatgcttgcactcagagtgccgggcctggcttttattctcatgatctatatagcctctatcgtgctgcaatttgtttctgggggctggtccattttattgctttatgcgtttaccatattaatcgccatttttgctttgcttcattggcactcatatcgctgggttaagaaaagagtgattctgtatttcgcggtacaaggtttgatcacctttgcacttgctaatctcatgactggcttctttatacttgtcattatcggcctttatgcatttttaattggacaaatcataggaatggcagacagaagaaggacttttctcattctttatctattgctgctgctggtcataaattcggcgtttcaccttcataaaggtgaagttttgcattttattgttattgctgggccaatcatgattgtcatcatcacttatgctgcaacattttttgcccaagtcgatgaaaaaataaaagctcaattgactcttgaaaggctggagctggctcatcagcaggtagaacagctgacgctgcagaacgaaagacagcggatggcccgagacttacacgatacgcttgctcaaggtcttgtcagtttaaatatgcagctggatgcgattcatgttcatctcgccaaaggcaacacagagagagcgaaggaaatcatacaacaatcgatgaaaagagtgaaaagcacattagctgatgcacgttcagctattgacgatctccgcagcaaatcagaagaaatcggtgttttaaaagaaagaattacctcgctaatggatcattttatagagtcgacaggcatggcttgtttattagattacagattgcatcaggtgctggatgtgcgtacagctgaaaactgttattacatcattggagaatgcatgacgaatgcggcaaagcatgctgaggcgaaaacaatctggatatccatttgggatgatgaaaagggaaggctccatttaacagttaaggataacggcaagggatttgatgttgaaaaaggaaagaaaaagagaggacattatgggcttcttggcatacaagaacgcgtcagggcaataaatggccaattcaatatcaagagtacaaaattgaaaggaacacaaattgagatcactgtaccaattcagggagagatgcaagatgaataaggttttaatcgttgatgaccatcttgtcgtgagggaaggtctgaagcttttaattgaaacgaatgatcaatacaccattataggagaggcggaaaatggaaaagtcgcagtccgtcttgcagatgaattagaaccggatatcattctgatggatttgtatatgccggagatgagcgggttagaggccattaaacaaataaaagaaaaacacgatatccccatcattattttgactacatataatgaagatcacttaatgatcgaagggattgaattaggagcgaaaggatatctgttaaaggatacgagttcagaaaccctttttcacacaatggatgcagcgatcagaggaaatgtgctgttgcagcctgatatcctcaaacgtctgcaagaaatccaatttgagcggatgaaaaagcagcgcaatgagacgcagctgacagaaaaggaagtcattgttctaaaagcaattgctaaaggtcttaaaagcaaagcgattgcctttgatttgggcgtctctgagcgaacagtaaagtctagattaacgtccatttacaataaattaggcgcgaattcaagaactgaggcagtaacgattgccatgcaaaaaggtattctgacaatagacaactaaactgcatatttgaaagttgcccaaacgtacatgcccgaatgtacgtttttttcatttcattgtcaactacaatgagaaagaatgtgatcaagcaatgcgttgaaaggagattatcatgtcaaaaatgttatatacattaggaggatgggttgctcgcaatcgcataaaagcaatatgtgcgtggatcgttgtgttagttgctgcgataggccttgcagtgaccttgaaaccaagtttttctgaggatatgtccatacctgacacaccttcggaaaaagcgatggatgtgattcaaaaagaatttcctcatggtcctgataaagggagcatacgggttattttcggtgctggtgatggggagaaacttactgggaagccagcaaaaaaagcaatagaagatacgttcaaagaaatcagtaaagatgattctgttgactcgattgcaagtccttttgtgacagggacaatcgcgaaagatggcacagttgcctatgctgatatcaagtataaatcatcagcagatgatataaagaattactctatcaaacacttaaaagacagtttgaaactggctgatgatgaaggattgcaaactgagctaagcggagatgtaccgggagccgagatggagataggcggtgtctctgaaattgtcggcattatcttggcttttgtcgttttagcccttacattcggttctttattaatagcaggtttgccgattttaactgcactgattggtttaggtgtaagtattggactggttttgattgggacacaagtatttgatattgcttccgtcagtctttcattagccggaatgattggccttgctgttggtattgattatgctttatttatttttacgaaacaccgccagtttttaggcgaaggcatacaaaagaatgaatcaattgcgagagcagtgggaacagcgggaagcgcagtcgtttttgcgggacttactgttatcgttgcactttgcggattaactgtcgttaacattccttttatgtctgcgatggggctgacagcagggcttagtgtactgatggctgttttggcttccatcacacttgtgcctgcggtcttatcgattgcagggaagcggatgattccgaaatcaaacaagaaaatagaaaaacaaagcactgaaacaaatgtctggggacgctttgtcaccaaaaatcctatcatgctaagtgtatgcagcattctgattttgatcgtcattagtatcccatctatgcatttggaactgggcttgcctgatgctgggatgaaagctaaggataatccggatcgccgggcatatgacttgcttgccgaaggctttggagaaggatttaatggccaattaacaatcgtagcggatgccacaaatgctacagaaaataaggcggaggctttcgcagatgcagtgaaagaaataaagggtttagaccatgtagcaagtgtcacccctgtaatgcctaataaagaagggaactttgccatcattacggtcgttccggaaacaggtccaaatgatgtcacaacgaaagatttggtacacgatgtacgcagtttgtcagataaaaacggagtagatttgcttgttactggatcgactgcagtgaatattgacatttcagatcgcctgaatgatgcgataccggtgtttgctgtacttattgttggctttgcgtttgtattgctgaccatcgttttccgttcgctgcttgtgccgcttgttgctgttgcaggtttcatgttgacgatgacagccactcttggaatctgtgtatttgtcttgcaagacgggaatctcatcgactttttcaaaatacctgaaagagggccgatactcgcgttcctgccgattttatctattgggattctgttcgggttagccatggattatcaagtattccttgtcagcagaatgcgtgaagaatatgtaaaaacaaacaatccagtacaagccattcaggctggattaaaacacagtggtcctgttgttacagcagccggcttgatcatgatcttcgtttttgcaggatttatctttgcaggcgaagcttctattaaagccaacggattagctctttcctttggtgtgctctttgatgcctttattgtaagaatgacactgattccaagtgtcatgaagctgatggggaatgcagcttggtatttgccgaaatggttagacaagatgattccgaatgtggatatagaagggcatcaactgacaaaggaaatacagccggaaatagatcatgaacaaaagaaacaaatcagtgtgtaatagaaaaagcagatctttaatgatctgctttttttgcatatggtagtatttagaagatgaagtcggcagttaaaaggagacacttatggcgccatcactcattttcgatatggatggaactttgtttcatattggcagaagctgcatcatactagcaggcatcccaggagaagtgacatgattttttgactttgcattcactacttgatgccaaggatcttgagaatccttcttgaaaataaaggattttacaactgatcatataagaaacctaaagaaacaagcacacaaaaccagctgcgggttttgtccaagaaaaatagagtccatgagagagactctattttttgaaatgcccggctagaagtatattgcaggtctttatgaatgcaaaacactatcttataagcccttaccgtgaaatgcctgtttctgcattgaaaaaacgcattacacgttcatttacgtaagcgggttgttccatcgataaaacatgtccggcatttttaatgacttccgcctcaatatcaggaacgaatgaagaggctcggtgcagggctgagtggggatcatagatgacttcatgttcaccaagtaataataggataggaactcttgctgaacgtaattcctcatcggtaaaaacatacggaaatccgtctgctttaggatttggatttcttgatccatcctgccacattacccctgcctgaaactgcttcacaaaaatcgggtgcagcacattctgatcattcatcatccaatttaagaatgtttcaactccatttgacgctgtaaggccaagagcgtatttgtagaaatcgtgatgaaatggcaaaaacgtttctgccggactcagtatagctgcgctttttactctctcaggcatacgtaaaaggaaattcatcgtatggagaccgccaagcgaaagtccgatcatgtgggacttttcgatccccagattgtcaaacacatcaagaagccaattggcgtaatccgttcttgtaccgcttaaattctcaggaatactcttgtttttatcacctatgatatcaactgcataagttctgtatttgctgctccaatcggcgatgttgggataccacatcgtcgagctgaataatgctccgtggagtaatacaagcggcggggcatcctctgggccgcttgcaatcacatgtgtttgaccaaaacgagtagatatatagaatgatttgcaacggaccggccaaagactaaggctttcattataagtttgataatagcggataccgttgtcacttaattcgggaatactagatgaatggtttgacatacaaatgcccctcccaacattgtttaaatgaatgtgccgtttcgtgatggggaatctgattttgatataacagactttatttacaatataatacagttgttgttagacgtcaaatccaagatgaaaaggaaataaaacgattggaacagattattgaaaatcaatataacagaatattaacctcctttgtggagccgcttcattaaaaccgcaatccaaatgcatgaatcacaaaaatcacaacaggagggatcaagagggaaggcagcaaattcaatgttttgaacttcttgattccaagaatgcttagacctgaactgaggatgagtatgcctcccacaattgtgatttcattaataaggtctgtattgattgcgctctccattactttagcaaataaatagatggagccttgccaggcaaataatacaatggctgcagccgctattccaaaaccaaaagttgaagcgagcacaatggaggtgatcccatctaacatcccgtttgtcaggaggtatgtataatctccatgcaaagcggcttcaacagggcccaatattgacagcgaacctatacaaaataataagaccgcagtagataagccctctgctaaattacttttagaaaatttgttcaccagcttgttgaatcgtaattctaaattgatgatctggcctagcaaacctccaatggctaaactcacgatgaatagaatggggtatttactatcaggcaaatgctgtgtaatggcgttgatccccagcgcgactgcagcgaatcccattgcctgcatcaaaatatcctggtattcatctttaatgccttttttgaatatccccccgattatgcttcctgcaatgatcatcactgtgttaaaaatcgttccaaacataagctttctcctccaaaaatcattcctgcataaaaaataaaccctctagttagtagagagtcaagggagatcaaaacatattcatgagattatttgatgggcagcaggatttcagtcacgtaattatctaggttattcgtaatgccataatcaatgagtgtgatttcgattgagtcccctgctacttcataatgatgttctttcatatatgccagtaattttttgtagtatggttcggcttctggatgtgaccctttaaacctaatttgcagatattctcttgaaggaaagatgatttctgaagaagttttttcattttcatcttcaagaatcataaatatactggaatatttgtcaaactgttttgctttcacatttgctgcagaaatggataaaccgatcttgcctatgaatatatcttcgtttacattcaggtgggttctcaattcagctaacgaatgttcgatatcatggccgagaacatattcatgctgcaagtaagccacacgcattgcgggaagtttgatttttgaaatttgatgtaacggcatgttaacggcatcttctatatgtgtgatgcgtcgggagatctttcgttcgatgcgttccaattctttctttttgcgatcaatttcagcctgctggctttttagtaaatgaagaagagtgtttgtattttgagagttataaaaatcaagaagcttattgattggcaggcctagggccctcaaatacttgatggtatcaagccgctcaaactgttgggtagaataatatctatagttcgtttgctcatctttatattccggtttcaaaaggccgatttcatcataataccgaagagcagagattttcacattgaataactttgacacttctccaatcgaaaaaaattccttcattctaacaacctttctgtgcctatgattgatatacacacattatatagtacggcgagttctaaaggtaaagtttgcatcataaagaaaaagctccttctaaaaaggagcttttcactcttcgaaataaggatttacatggatgagcacttcttctacatctgaaaactgtcttttgatttcatttcgaatttcgcgggcaatatcgtgtccctgcttaattgtcaaatcatgatccaaagataaacggacatcaagcaatttatagtggccatgttctcgcgcgcggattctatcaattcgttttacttgatcacattgaaaaataacagctttatattcctctatcagctcgggatcaacactcttttccatgagcacatcaacagacggcctgattaattccattgaaatcttaaaaatgaggtaagcaacgattgcactggcaatggcatcggcgtacaacagataggaccatccgcgggtgtttccgatgatagccaacaggacgccgataaaagcggcaagagaggcaacgatatcgcctttatgatcgtacgcaatcgctataatcgctttgctgttccatttttccccttgctttatagaataacgatataagatttccttagccacgtacgaaatcagagccgcaaacaatgcgctgtattggggaacgcttggccctttaacaaaggacagaatcgcttctatgaggatataaacggatacgatcactaagataattcctacaatcgcctcactaatgacttcagcttttccgtgaccaaaaggatggtcttgatcgggcggtttattggaaattccgatcactgccaagactgcaatcgaagcaacgacatctgccgcggaatgtattccgtctgcaaacacggcttcactatcgcctaccagcccaaaaaagacctttcctgccattaagatcagattggcgatcaatgcaatcaaagcaacttttctgcttatttgttctctttcacttgccattttttcctcctataaaactgcacaaaaaaataggagtgctctatatacgctctccgtatcctttcctgtgtaatcactttgtttatcataccaattcaatttcgagtgggtctatagcaacgttgtttcctgtttactaataaataaggtgacagaaaaaaagttggagctatgctaaaaaggtcatacagcaaacaaatgagttcttatgtaacaacagtgatgattcgctattaaaatgctgccgtcagtgaaaaatttccacctaattttcaaaaacctattgacatgagaagatctgtattttactattatctcatattcaagatattttaatttgagatatttggtcggaaagatcagcgatcaagcgcatctctaagtgttcaatccgttgtcatttcttttacacaatattcaatatggattttttataataaaatatctcgaattcgagataaaagggagtgtatcgtaatggctgaatttatacagttagtcaatgaaagacgatctgcaagcaattttctttcaggtcatccaatcacaaaagaagacctcaatgagatgtttgatttggttgcattggcgccatcggcttttaatttgcagcatacaaaatatgtggcggttcttgaccaggacgtaaaggaaaagctgaagcaggccgcaaatggacaatataaagtggttagctcttctgcggttctcttggtattaggggataagcaggcatatcaacaagcggctgatatctatgaaggtttaaaggtattggggatattaaataagcaagagtatgaccacatggtgcaagacaccgtttcgttttatgaaaacaggggagaacaatttaagagagatgaggcgataaggaatgcttcactttctgcgatgatgtttatgctgagtgctaaggaaaaaggctgggatacctgcccgatgatcggctttgatgcggaagccgtaaaacggattttgaacatagacgaccaatttgaggttgtcatgatgattacgattggaaaagaaaaaacagagagcagaagaccgcgcggctaccggaagcctgtgaatgagtttgttgagtatatgtaaaaggagcggataaaaatggctaaaaaaacgatgggaattcatcatattacagcgattgtcggtcaccctcaagagaacacagatttctacgcaggagtgcttgggcttcgtttggtcaagcaaactgtcaattttgatgacccaggtacgtatcatctttattttgggaatgaaggcgggaagccgggaacaatcattaccttctttccgtgggccggagcccgccaaggcgtcattggagacggtcaagttggcgtgacttcgtatgtcgtgccgaaaggggctatggcgttttgggaaaagagactagaaaagttcaacgttccctacaccaaaatcgagcgctttggggaaaaatatgtagaatttgatgatcctcatggactgcacttagaaatcgtggaaagagaagaaggagaggctaatacgtggactttcggagatgtaacgcccgatgttgccattaaaggttttgggggtgcaaccctattatcagcgcagcctgacaaaaccgctgaccttttagaaaacatcatggggctggagcgagtcggcaaagaaggagacttcgttcgttatcgttccgccggtgatatcggaaatgtgattgaccttaagttaacgcctattggccgcgggcaaatgggggccggaacggtgcatcacatcgcttggcgggctaacgatgatgaagatcagttagattggcaaagatatattgcttcgcacggatatggtgtaactcctgttcgggatagaaactactttaatgccatttacttcagggaacacggggaaatcctgtttgaaatcgcaactgatcccccaggctttgcacatgatgaaacacaggaaacaatgggcgaaaaactgatgctgcctgtgcaatatgaaccgcatcgcacacaaattgaacaagggctgctgccgtttgaagtaagagagttagattgatttgacacataaaaaataaagaaacatatattcaattgatgattgctggataccgtcagcaaagaattagataaaatcaaagatgaggagagatacaaatggaagatgcaggactgttgcttattcgtataatgattggtgtggtgtttttgttttatggcacacaaaaattattcggctggtttggcggatacgggattaaaggaaccggacaatggttcgaatcaattggggtgaaaccaggaaacgttgcggccgctctatcaggtcttggggagttagtaagcggaattctatttattttaggcgtattcctcccgcttggagctgctatcataacgatcatcatgttaggtgctatcgtaaaagtccatggagcgaaaggttttgcgaatggcgccggaggttttgaatataacctggtgctcattgcagtttccataggggttgcactcatcggttcaggagcttacgctttgcatttttaatacgaaagtatgtaagaacagttgcagcttgtcggtaactgttcttttattttgacattttcggcaagcttgcaggtactctgcaaagcaaaaaagcggatataataaatataaatctgtatagtgaatgatacgtattgatgagcttggtcatgaaaaacagacctatttgaaggagtaaatggatgaaagagatgacagaattacattcattagtttttatagaaaactttatcaaacagcacaaattcagttttatttatatatcaaggcctggctgttcagtatgtcacgcagttctgccccagctcagaatagtattggatcagtttccaaacatcaaattggggcatatcaatgctgacgatgtagcagaggtcgccggcagattttcagttttcaccgttcctgtgcttcttttgttcattgatgggactgagtttctaagagaagcccgttttgttcattttgaacagcttgaacaaaagctgaaaagggtttatcgattatatgaaggcgaataaagaaataaggcaaaaaaaagaactcaaatgagttctttttttttgcatcaatttattcttcactaggcgaagaagggttatcaacctgcccttgatcacttgtatcattatcacaacttgctgaaataataattgaatgagaaggagagtaatctcctaatgtgaaattgacaccgtaatttttgctgttcgcagtatggctgttttgcaagttatgtccgatatctgtattggcgttttgtgtcattccatttatcgtgagatttgagatgttgatttgagatcgcatgcttcaaaaactcctttcactcagaagtagccgtcatagaggacgctggcagtctatttacttctatgatattgcgtttttatatcattgcatcaacataatggtaaaaataatagcgagtgaatgagtctcttttgaagatgatcaacctatcagcagaaataaagccgcctgataaagaggcggcagatcgttatatgtcatctatgaatttgatgtatcgtttttcgtttgcctaaaggatagaatggtcgtttttaatgatgagtaggagcctatagcagcgtagccataaaaccagcccataaatacgccagaaaagaggctgtgtcgatggcttatgaaaacagaaatgacaaggcctgttattaaggcaactgacggtacaaaagttttggggattttcaataatattttgaggatttgggttatcaatatgatgattggaacagctatcacagcatcccaaaagttcgtgtgaataattggaaaagccatacggcacctcatgaagtgtttatttcttaatttttacgctaaaagcttggaaagcagctcttggatcgcatatgttacattttgggcttgattggcggagcttgtttggcttaaagtattggattcaaaaaccaaacctgtattactcccaccggaaccctctgttgttttagacacagagaacgggctgatggaaactgcaaatccgttattaaaaacgctgttcccggatatcgaatgaatataaactgggaatttcatcattcatctctcctctctgttatgactgtttatacaatatggtgtgtgagcagcagttgcttaaacaaaacggcaaaaactttcagtaagagacaaaaacctgcaaaatgccacaagcgccttttgttaatgcagctttttagggacgttttttttattttttttaccaacttcatcaaaaatattctgattgccagactgggcttgtccatccttatttatgaaatcggggtgaatgagttttttcagatccctgactgttaaaggcttggcgtcatcagttaattctattcctaattgcccgtttgcctctaatgtcgcaattttgacatcttgtatagccgtaacgccgtgaagccttagctgcatttcaagctggtcagctgtaagtctcatcttctttaagttttcgatatgaagctgtccgttttcaatgacgatttttgcttttccggttaacatcttttcaatggtgttcgatttcatttggatccattccataacgatgagtgtgcttgtgaaaattgccgctgcaattaatgttttgaagaggctgtactcgatgattggctgaacgataatagttccgatcgaaatcatgacaaccgtttgagttgacgtcatttgtgcgattgatttccttcctgaaattctcagcaaaatgaccccggctacaatgagaacaagagattcccaagtgaaattcatgctaccacctgaccaatgatgaattagatttgtcatgggattggcttttcttccggccaatcgcaatttaatatatccgaaaggcagtcggttcattctgtcctgaaccgaacaatatttttggtatagatggatatattaagccaaacaatgatagcaacaggagttttttggccgaaacaatctgggaagcggggagcgccataacatgattgaacttgaagttgtcattagaacggttgccagctttggcttgctgttaatcgcagaacgaattttaggcaaacagacaatctctcaaatgacgatttttgattttattgcggcgatcacactaggggctattgctgccggattagcttacaatacttcaataaaatcgcacaatatggccatttcgtttagtatttttgtgctaaccatttttctaatttcgtttctgtcgataaagaacaggaagctgaggaaattttttgccggagatccaacagtgctgattcaaaacgggaagatacttgaatcaaatatgaggaaaatgcgttacacacttgattatttaaatcagcaattacgggaaaaagaaatatttaatatcgaagaagttctttttgccattcttgaaacgaatggtcagctgactgtgttaagaaaaccgcaattccggcatgtgaccaaacaggatttaatgattgcggtaaaccaagaacaaaggcttccgatagaacttattatggacggagaaatcattgagaataatttaaagcagaatcgtttgacggaatcctggcttttggaagaattgcgaaaaagagacataaaggtgaaagagaccgtgtacgcagtgctgctgggtaatggggatatttatgtggatcaatataaagaccatatatcagtccctatggataaggaatgaaggaacaatcaatcttaaagctccttattgaacgcaatggtttcaacttgtcttgggtacgaaatatgcagaagcccgtttaacagctgaatctgtaacaaatgagtttcagcggcttcgggaagctgaatgattcgctcaatttctccgtaataccgttcacgcagcacttccatttcggctggaaaaacaggcgtgatcgttcctttgatcagcagctgggttttagacagtaaacggatcgttaattcttcctcatacacaccgggcatttccacaatgataaaattatattcctcatcttgataaaagtcgtaaacaaacgtagaagcttcggaatcaaaaaaatgttccggggctttatatttgagcacatttgtccaaaagtcactttgtttatattcattcgtaatctcaagccactttcgaattttttcgaaatccatatgagattctccttaaatttgatttgaaatcggcgcagaagggtttccgatttggtcttggtcactaacgtctgaatcaatatttccagtgttcaaaagtgaagacgtaggcgaaagatcccctaaggaaaagtttgctccaaaatatttgctgttcgcagtatggctgttgtgcacagtcggaccgacatctatatttccgttttgcgtgacgccgttgatcttaatatttgcgatattaatttgatatggcatagacgaaacccctttaatctaaaattggcggtggtgcaatcggaggagcattaacgttggatgtatcagagttgccgatagatgtctggtcatttacatcaggatcgtttaagaagttttccattacggattctgtaggtgatgtatcaccgaaagaagagttggtcccttgagatttttgattgttggtagggctgttataagcagcttcgcctattgtaattgaaccattgcccgaaatactgttgatcttcaaataatataggttgattactgtagacggcatcccatcacacccttccatctttctgtacagtacattatgcgccgctgcacccaattgttccttgcatttacgggcaaaactctatctggccctggagtgatgctcgttagaaaaaaagaataaagtttgtcacagcctgaatgtcaatctatttggcaaatacttatcagtgaatgaaaagccattgatataggaagcaatgaattgattcagttattcgaaatgcatgagaccctttaataaagaaagctggcaaacaggatcagtttgaaattattgacaatgaagcaaatgccatgaaataatactcgtgagtaacattacttgcgagtattatttttgggggtggtcctcgttgaaaagtaaaaaaggacgtaaaggggaagaaagccggaaacggttactcaaagctgccgctaatgaattttcgattcggggattccatgacgcgaaggtaagtgaaattgtgaaaaaagctgggttcacgcagccttcattttacctgtactttcaaagcaaagaagccatctttgccgagttaataaccgattttcactctcgggtcaaaaagctgacagagtcacttcttctggaaaacggattaaacacggaggatgtgtcaaaacgggtactgctagctgtagagactgtttttcagtttttggctgaggacaaggatttaaccaagatcggcttttttctcaacccggaagcaaaacaaatgaaaaaagacttggcgatggttttgaaagagaacttagaagcagaacagcggcttggctattttcactctgaactggatatggaaactgtcgctgagtgtttggtcggcatgattgaacatttaaccgattcatttttgttaaccggaatcaaagatccggcaagcctcgcagcagaggttgtgaatcttttgatatacgggatgcttccgaaagggaatgacgtaagatgatatctattattctgaaagtcagtttggcagtttttatgcttgcgggaggcatcataaaggtaagccgcgttccctttcaagttgagcattggcggcattatcaatatccattatggtttctgactgttactggcattcttgaaatagccggggcacttgctatgacagcgggaatttggaatcggtatgcagcgattggagcaggtgttctgtttgtcgttctcatggcgggagccattcatgcgcatatgtttcgagcaagacaatcggtcatcatggcgataccagcgatgatttgtttgattgtttctatcatgatcatcatggggagttacacgtaagcttttcactaatgtttaagaacaagcccatttgcaggaaacctcctgttcttatcgaataatagaaagtccaggaattaactgaagcagtaaaatagagatccatttctgcgttattcgtccggcatcagctgggctttttttataaaggaggaatacaggatggcattaactttggaagacatgactgaggaagagttcgaagcctttcgcgggatgtccgtgcaaaattttgcgaaacaaaacataacttcaggaacttggacggaaaaagaggcatttgagaaatcggagcagacatatgagaacatgattccgaatgggcgagacagcaacaatcattatttttggaacatcacaaatgaccaaggggaaagaatgggctggctctggctgtacgctgatccgtttcatccgcaaaaggaagcgtttatctattcctttggattgtatgaagcctttcgcggaaaaggacttgctcaattggcgcttcaaacgcttgatgaaagagcaagagagcttggtgcggaaaggctggctctacatgtatttgcacacaacgagacagccgtctatctttatcagaagatgggctatgccttgaccaatatacgtatgcggaaacagctatgctgaaaagtcgcttacgttacccaaacacaagatgcctatctggaagcagtggcagggtactataagtcatcattagaaacattaaggtcatgggaaggcttgaacatataaagaaaaaaggacaacagctgttgtccttttcaatgccgcttgaactttctccctcagtcttttttgtcttgatgatccagctcttttattcgtttcgtaagctcattgaaagcctgatcaagctccttataccctttatcatttggcgtcataaaactgagctttcccagcacttcttgtctttctgtctcaagctttaaccgaagctcctcccgctcatttctttctgaaggagcgtcgtttaactgcttttcgatgccgttgtttgagatgacgagtttactgtttgttgttttttcgagaaagtatcggtcatgtgaaaccgccagcaatgtgccgctgtattgtgacagtgtttcttccagctgttcgcgtgacggcaggtcgagatggtttgtcggctcatctaaaatcagcacgtctttttcctccagaatatatgccatcagcttgatctttacacgctcacccatactcatatgcttgatcggttcagtccattggtcggctgtaaaacctaagtgcctcatcagattttgaacgtgcccccttgctttgaatgtttcattctcaaataactcttccggtgtttgttctaaaggcaaatcaaacacctcctgcgttaaatagccgatgtttgcggacggcgacacccatacgcttccttctgctgtttcctgtccaagaatgatattcagcaatgtcgtttttccgctgccattggggcctatgatcgcaaccttttcgccgtgctgaattgtaaagtttgcgtttttaaagagagtcctttctccaaacgcttttgttacattctgaacttctaaaaaccgtttccctgttttgtgggttgtatcgattgaaaagcggactgtatattctggggtaacgggttccgcctttgctttttcaagctctttttcaagccgcttctgcttggattttatctgggcatccgtacgcttcgcttttacccggtgatattctttaaacccttcctttttcgtcgattgagcatgggctttttccgaccaagaagcgagctcattcatttgtgcttcaatccgttcaaccattttttgctgcttttcatattcacgctgctgggtgagtcttttcttctcccggaacttcatatacccggagtaattccctttgaattcaatcagcgtctgatcctcaagcgaccatatttttgttgcggcttcgtctaaaaaatatcgatcgtgagaaacgagaatcacagtgccgttataatgtttcagctgttggatgagaaattgcaagcttttttcatcaaggtggtttgtcggttcatctaacagcagcagatctgcatcctctgatagtcctttcgccagccgcgcttttagtttttcaccgccgcttaactgatgaaaatcacgaagaggcacatgccatttctccagtaacttcttttcggcaggtgtctgatccgcaaaggaatatgccgctgtttcctgttcaaccaaagccagttttatatcctttcgaaggatttgaccctgggaaggggctaagtcattgtgaatgaggtgcagcagcgtagatttcccagcgccgtttttgccgataatcccaatgatatctccttgctgaacactggcatttatatttttaaaaacagtcagatccttcacttcatagctaacgtttgttaatgttacgatctctttcatccatatccctcgctttaaagggagaataaaaaaatcctcccaaatgtgttggaaggattagccgtgcctgtgcatgatcaaataagctattttttataaatagcaggtcgtatatatagaaaatgggcagactaatcctattttttgatttgaaatattgatttcaaacgataaaaataagattagttaatcattgtccacccatcatcccttcttgttttgattacaaacactatagcataccttcaaattcaaaagcaaaggtcattttcatcaaaaaaactcctgctctcatttttgaggcaggagtttcgagtgttattgatgcttcgcttttctcactttataaatcacaatcagcaaaataaaccaaaccggtgtgacaaataaggaaacacgagtatcctgtgccagtgccagcacaaccagaacaaacgccaggaacgcaagaatcaggtaatttgtaaacggataaagcggaagcttaaacttgtttgttttcgctaattcaggtcttgttttgcggtatttcatatggcagatgaccgtaattccccaaatgtagataaagcatacggttgaaatacttgtgatcagggtgaatacgccttctggcatgatgtagtttaacgtaacaccgattaaaatcacgatagctgaaaagaataaagcatttcttggcactttacgctgagtcagtttcgccattgactcaggcgcattgtgatctttcgccagggaatagaccatacggcttgtactgaatacagcgctgttgcatgctgaagcagcggaagtcaatacaacaaagttgataatacttgcagccccgacgatgccaaccgcgacaaatacttgtacgaatgggctttcgctgggattgatgacatcccaaggatagatgctcataatcacgagaagagccccgatataaaaaagcaacacacggacaggaatattgttgatcgccttagggattactttttcaggattttctgtttcaccggctgtaagcccgacaagctcaatgccgacaaaagcaaacacaaccatctggaacgagaggataaacccgtgcatgccattcgggaacaggcctccgtggctccagagatttgtgaagctggacactcctgagcttgtggaaaagcctttgaaaatcatcacaaggccaatgacgattaacgccaaaatggcaatgactttaatcaaagcaaaccaaaattctaattctccaaaaagcttgactgtcgccaggttcataatcagtaaaataattagagcgattaagccaggcacccattgcggcacacccgggagccaatattgagtgtagagcccgactgctgtcagatcagccatcgcaatggaaatccagcagaaccaatatgtccagccggtgataaatgctgccatatcgcctaggtagtcttgtacaaaatccacaaaagagtgatagttcaagtttgataacagcagttcacccagcgatctcataattaaaaagcaaatgatccctgtgatcatataagcaaataaaatcgaaggtccggcaaaatgaatcgatttgcccgagccgagaaataagcctgtcccaatggctccgccgatggcgatgagctggatatgcctgtttttcaagcctctctgcaacgtttgctgatttatattgtctttcgtcatgtcgtctgtcactttatgtgttcctccattgaaaattgtttattgagtcagcaatctatttttaatgattattataacactaaaatttctatcttttttactaaaaaaggattgatgaaaagaattttaatgtgatttggactatttcccgaaaaaagcggctccatttagggagccgcttttttatgctttttcagtttttgtcataaacaggtagagcccgtaatctgtcggtgcggatgcgtagcctgcctgccgcagcattgctgtgatattgccacggtggtatgtcccgtggttgacaacgtggggaagcagttcggaaacagttgttttcatgattccgcttgagggattctgaatctggagtggcttattgagctgttctttttgctgtaaaaatagtatatagcgctcggataacctcagaaaaaggtcttccatttcctctatttctttagcctctgtctgttctttaagctgttcagctaaagccaacgcatcgctcaaggttttgccggaaaacacttcaatccagccgagatcagaaagataaacatgagacaatacatgggatattgacggaaacacgctttgaatttcttgatggtatacctcttttggaagctcttttaatcggttgaatatttgttgattggcccagacgttatattcatacaatttgaatgcaaaatctgacatgttaaaattccccctttcgtgtgtatagcttccattatacacgaacatgagttcttatgtagagtgctcaaaaataaaatttgttgacatatatagtttagaggaataaactaattgacattgaacataaagtttagcggggtaaactataatgaggaggggaagatattgaatgaacaaaagctatgtcaggcgataaacctgtttgtggaagtcctgcttgaagggacagaatttgtacatcgtgaaatcaatcaggatgtcttcaagcatatctcaagggaacaggcagacctgttgaaaattttaaaagtcaagggcccaacctctcccggcagcctggccatgtaccaaaatgtacataagagcgcgatctctaacagactgaaaaagctgctcgaaaagggattggttcaatgggacgactgtctggaaaaaagtgataggcgctctaagcttattaacattacacccagtggtgaacacatactagaagaattagattctgccatctttaacgcgctcaaaccgctgattgatgatatagatgaggaacacttacattccatcatcgagatattcaccattttaaaaagcaaatttaaaggaggagattctgccgaatgagagcaatcatcaaattcaagtgggcaattgcagccatagtattagcacttaccgtcgttttgagtttgttttctccgaacttaacggagctggccaatcaaaaggggcaggcccagcttcccgctgatgctgtttcagaaagggcaaacgccattttaaaacaagcgggagaagacaataattcgatcagtgttgtctttacattagacaacgctataaagaaagaaacagagaatcagctccggataatgattgataaaatcaaaaagatcgacggtgtagaagaggtaacatctcctctgtcagcggaaaaagaagtcaaagaccagttgatgtcgaaagacaagaaaaccgttctcatgcctatcacgattacaggttctgataaaaaggcggaaaaaattgcggacgagatttatcaaatcgttcctgatgacttgacggcatatattacgggagcttcccttatcaaccaggatttcgctcacagctcagaggaagggcttaagaaaacggaagtgatcacagtctgcctgatcatcggtttactgttgatcgtgttccgatctgttgtgacgccttttatcccgattgtggttgtcggtttttcttatctgatcagtcaatccatactgggcatccttgtatacaatgttgattttcctatctcgacgtttacgcaaaccttcttagtcgcgatcttgttcggcattggaacagattactgcatactgcttcttacacgattccgtgaagaattggcaaacgggcatgataaaaaagaagcggcgcttatcgcttaccgtacagggggaaaaaccttatttatcagcggttttgcggtattgatcggattttccgccttaggatttgcgaagtttgcgattttccaatccgcagtaggggtagcagtcggtgtgggaattttaatgattatcctctacacactgctgccattatttatggtgacgctgggtgaaaaattattctggccttctaagaaagtgctgtcacacagtgataacaaactatgggcgtttctcggcagacactccgttgcgcgtccgtttctgttcattgtcatcacggtggtgattacgcttccgttcatcttgacctatgatgaccagatttcattcgactcaactgcggaaatcagcagcgattataaatctataaaagctctcgaggccattaaggatggattcggggaaggaaaagcgttcccgatcaatgttgtcgtaaaaggagacaaagatcttacaacagctgatacaatcccctatctaggaaatatcagcaaagcgatcgagaaagttgatcatgttgactctgtgatgaccattacgcagccgactggtaaaaaaatcaaagatttatatattgataaccagctaggatcggtttcagacgggctggataagacggtaaaagggattgccgatgtccaaagcggattaacggatatagaaaacggactgaatcaaatggcagggcaaaccggctcggcctcaaatggagggtctggcggttcactgggcgatgcggcagatggcttgggcaaaatcaatcagcagctgcagctcgtgagcaaacagatttcccaaaccggcaataccgcacagaccgtgcagcagcttacggcaatcagcggacagcttggccagattcaaaccggtcttgaacaagcgaaccagcagctctcaggccagcaggcacaagccggaacgctgacagaaagcctgaagaagctgtccgaaggcgtgaaaagagcaaatcagggcctgacgaaagtctctgacggtattacagcttccagtgatatgttagaggatatgagcaaaagttcaactgtaagagatacaggcatattcattcctggtcaagtaatgaaggacaaagactttaagaagtcaattgaccagtattcctttgcagacggcaaaggtgttcaattaagtgtcgttctggattcaaatccgtactcagaacaagctattacgacaataaaccaaatcaaaaaagctgtcgcaaacgaagttgacggcactcctttggaggatgcacagatcgtatacggcggggtcacgagtatgaatgcggacttaaaggagctgtccacaacggacttctccagaacaatggtgattatgattataggcctgtttatcgtgttaaccattttgttccgctcaatgatcatgccgatttatatgatcgcgtcattgctgctgacgtactatacgtcgatatccataacagaattaatttttgtaaacggcttaggaaacgcgggtgtcagctgggcagtgccattcttcagctttgtcatcttgatcgcgttaggggtagattattcgatcttcttgctggatcgatttaaggaagaggtgcaccttggcattgagcaaggtgtcgtcaggtcaatgagcaaaatgggatctgtcattattacagctgccattatattggccggtacgttcgcggcgatgatgccttcaggtgttaatacactgatgcaggtggcaagtgttatcatcatcgggctcttgctttacggccttgtcattcttccgcttttcatcccggcaatcattgcgacctttggagaaggaaactggtggccgttcggcaggaagaaaggaaaagagtaatcgagagaagagtgatgaatggtcatcactcttttttcatgatctaaacgacgaacttcagacgtgttacccaaaaaaggtcagacgatcaaacggcggctgggtacttaaaaacaaagagcccggaaaacattcccgggctctttgttttatttccattctgcaattgtatcaatcggcagacggtaggaagcatagccttcgtctgctgcttttccgatagaaagtagcataaccggtacataacgttctttatctaatccgaaggtttccgcgatgttttctttatcgtatccgccgatcgggtttgtatcgtagccatgcgcgcgtgcagtcagcatcagctgcatggaaacaagacctccatcaatcaggatcgtttcacggttgacctgtgccggaagcttttcaaaatgtgcggtcagcgcggcgatttgtctgtctttgacctcctgcggcatgtaaccaagttccacggcttttgaatagatttcttctaagtagtctgcattgttcatgtctgcaaatacagcgatgacagcagatgatgttgtgacctgtgtttggttaaagcttgcaagcggtgcgagcttttcttttccttccgggctgtcaatgacaagaaaacgccatggctgcgcgttaacagaagatggggcagttgttgcttcctctaagatctctgtcatttcttctttgctgatttttactgccggatcatagttgcggatagaacggcggcctttcataatttccataaaatcgtttgttttgatcatgttgatacactcctcttaagcttcgatattatttatattgtttcgcatgcgcgccagcacatcaatgagcaggcggcgttcttctgcgcttacatttgcgagcatttccttcatgaaacgctccttttccttcttagaagactcaattcgctctcttccttggtctgttaaccgaacaagggtgatgcggttgtcctcaggcttgcgccgccttgataccatgcctttggcttccagctgtttcaggtgtctggtaacggctgcgctatcgatatttactttcttttgaaggtcgctttgactgatctcatctgcatgataaagcaatgtcagcaattccaaacgagattggctgatgcccgtgcatgcctcgaacttcacgccaatcaccttgttcacgccttgcagctgatataaaatctcggcttcctctgaacaaaatgacgccaaaacccatcccttctttcctgtcaaaactattaattgatatatcaatgattgacacgtcaattaatatacaacgattgatttcatcttgcaagccatttgcacttttgaacaacctcccagcgcataaaattcgctaggctagaacttagcaaaaaaagctggccgcttcttcagatgatgctggtcacgatgattccctgcatcattcccatttataggtgttcggaatatcactttgccgagcccgtgctcaagcggctttcacaggctgaaagttatgatacaatatacaaatgtttcacagcttcaatccatagttggagctgacatccattatataagggactaggttgaagggaaggtttgataacatgctgcacaatccaactggaaaagaacgcttggcactagcgtttctgctcggcatgcttgctatattgggcccgcttaatatagatatgtatttgccaagttttcctgaaatcgcgaaagatttatcagcaagtgcttcacttgttcagttaagtttaacagcctgtctggtcgggcttacgatcggccagctgattgtcgggccggtcagcgatgcgcagggaagacgaaaaccgctattaatctgtatttttttatttgcgttatcttctctgttttgtgcactgtcgcccaatataacaactttagtggctgcgcgttttttacaaggcttcactgcttctgcagggcttgtgctgtctcgcgcaatcgtccgcgatgtgtttaccggaagagagctttctaaatttttctcgctgttaatggtcattaccgcggtggcgccaatggttgcgcctatgacaggcggtgccattttgcttttgccgttcgcaacgtggcatacaatttttcacgtcttaatgatcatcggatttttactagttcttctgattgcattgaggttaaaagaaacgcttccgctggaaaaacggattccaagctcaatcggaacatccgtcaaaacgatgggcagcctgctgaaggatcgatcctttatggggtacgcgttaactgtcggatttattcacgggggaagctttgcatatgtgtctggtacgccttttgtataccaggatatctacggggtgtctccgcaggtatttagtattctttttggcattaacgggttggcgattatatcgggcagctttatcatcggacgctttggcggaatcattcatgaaaaaagcctgcttcgtatagcggtcattacggctatgattgcgacggctgtgctattaaccatgaccatgattcacggtcctcttgctacattagtcatatccattttcatttacatgattacgatcggcatggttctgaccagcacgtttaccctagccatggaaaagcaggggcaccgcgccggaagtgcaagtgcgctgcttggaatgcttccgctgctcctcggttcaatcgtgtcaccgcttgtaggcattaatgagacaacagccgttccgatgggagccatcatgtttgtgacagctgtcatcggctcactggcgttttttggattaacgaaagaacgagtagggcagaattcataaaaaaacctgacatgacgtcaggttttttgttttatttagaataacaacagcaggcctgcaatcgccggagtcaaaaagatggctgatttcaaaaccacctttggcatgaggttggtgaatttcgcgcctacataggccccgcacattgtcccgaccagaactttgacaagtaaaacgtaatcaacaaaaccttctgtaatatatccgatgcctccacctacagccagagggatgatcacaagcatcgtcgttccgacagaatggcgaatggacagattcagcataatcattaaaccgatttgaataaaaggtgccgacccgatgccgaatgtgccggaaagaacgccggctgcaattcctaagatgaccgctctcgtatacgttgaaagagtgctttgattcacttgagccttctcttttaaaataaataatctgattaaaatgagaattgctgataaaaataacattccagccgtcaaataatgaagcaaatcagccggaataaaagaagtcagcttggcgccgaaaaatgagccaaccgcagcaaagcctccgactattaagccgattttcatttgaatgttaccctcgcgatagtggctgtatgcccctgataagcttgtaaaagccatgccggcaagcgaagtgcctaaagccgtatgaatcgggatatggaaaagaagcgttaaaagggcaatgacaaagccggctccaccggcgccaataaagcctaaaataattcctagaagaaacataacaagaataatgagcatattttttcctccattgaaaagatgtaaaaaatgtaatcgtgcgctattctggcggaggtatggtgtcctattgacgaagaaaaacacgccgttttttcagttgccagtagtccgtcgaccgtcgttcagcaaacatatcgtacctcaaattctgggatctgacaaggcagtttgttgcttcccattaccatctgttatatgattttgatgaagaaaagcccttgaatatattcaaaagaggtattatatatggacgattttaaattagataagccgactccctactacctgcaattttataaccagctaaaaaaaatgatcttcaacgggacttttaagcctggggaacggataaacgaaacacagctggcgaaaagctttggcgtcagccgctctccgataagggaagccatgcgattgcttgagaaagatggtttgttaaaagcggatgaccgaaatgggttttcgatcacgtcgttaacggcaaaagatgtagatgagatttataaaatcagaattccgctggagcagctggcagtcgaattagtcatagacgaagcggacgaagaagagctgaccatactcgaaaaacagcttgaagaaacagagaaagccattcacaacggcacggaagatacggaaatcattcgtttaaaccaaaaatttcatgagctgctggttgatttcagccataacagacatttgaaaaatttgcttgagcatgtaaatgacctgattcatttttgcagaatccttaattataccggcgaccaccgtgcagaaacgatactgcgtgagcaccgcaggatatttgaagaagtgaaaaagaaaaacaaagaagcagccaaacagcatgtgctggctcatttcaatcatgactgtgagcatttgaagcatgtgcttgaagaaggtaaagagaattgatttgtatgatccggtaccaagggagagcagaacccttggtatttttttatgtattcaccacatatctaagaggccccgttaataagattttatgatggtttgactaacgaataatgggggttaaacatgtttatccatatcgtcgggcctggtgattctttgttttcgataggcagaagatacggtgcttctgttgatcaaatacggggtgtgaatggtttagatgaaacgaatatcgtgccggggcaggctctgcttatccctctttatgtatatacagtccagccgagagatacgcttaccgccattgcagctaaagcgtttgtgccattagagcgactgcgagcggccaatccgggcatcagcccaaatgctttacaagcgggagcaaaaataacgattccttcgatctcaaattacattgcggggacattgagtttttatgtgctccggaatcctgacctcgatcgggagctgatcaatgattatgcgccatactcgtcttcgatttcgattttcgaataccatattgcatcgaacggcgacattgcaaaccaattgaatgatgcggctgctattgagacaacttggcaaagacgggtcacgccgctggcaacaataacgaaccttacatcaggaggcttcagtacggagattgttcaccaagtgctaaacaatccgacagcgagaaccaatctggtcaacaacatttatgacttagtttccacaaggggatatggcggtgtcacaatcgattttgagcaggtgagcgccgcggatcgcgatcttttcactgggtttttacgccagctgagagatcgccttcaggcgggagggtatgtgctgacgatagctgttccggcaaaaacaagcgataatattccctggctgagaggctacgattacggggggataggagcggttgtcaattatatgtttatcatggcttatgattggcatcatgccggaagtgagccgggtccagtagcgccgattactgaaataaggagaaccattgagtttacgattgcgcaggtgccgagcagaaaaatcattatcggagtcccgctctacgggtacgactggatcatcccgtaccagccgggcacagttgcttcagcgatttcaaatcaaaacgcaatcgaaagagcgatgaggtaccaagctccgatacaatattcagccgaatatcaatcaccgtttttccggtacagtgatcagcaggggcggacgcatgaggtatggtttgaggatgtcagaagcatgagccggaagatgcagatcgtccgcgaatacagattgcaggctattggcgcttggcagttaacgctgggctttacaccgggcccatggcttctgcggaaattttttacgatcagaaaagtgtaaaaaaagacaccacaactggggtgtcttttttttgattaagtccagagcagcagaatagttcattcatttgtaccttgcataggttgtgttcccattttacgattagtagtagtctgatcaaacaaagagtcagaatacgatttgagagggagttgtctacatgaagacagtattgattttgaattttcctgcggaaggccatgtgaatcctaccttaggcattacaaaagcgttttccgataagggatatgatgtccattatatatccactgaaaaatataaaaaacgattagaagcagcgggagcaacggtccatcttcaccgggatctgctgcgaacaacacctattcatgtcggttcgcccaatggcattcttgatttcgtgaaaatccatatcaaaacgtcattggacattttacagattgtcaaagacttatctaagagcattcaatttgattttgtttattatgataaattcggcgcgggggaattggtaagggattacttagatattccaggagtctcttcatcggcgtctttcttgtttggcgaggagcacctgaaaatcctgccgctgcatccggagtctggagcgccgcttgaattggatcaagagtgtgaagatcttttggcaaaaatgaaagaaacgtacggtgttgccccgaaaaacctggttcaattcatgaacaataaaggggaattgaacgtagtgtatacaagccgttattttcagccagaaagtgatcgtttcggggatgaatgtctgtttatcgggccaagctttccaaagagagcggaaaaaacagatttcccgattgaacagctaaaagatgagagtgtcatttatatttcaatggggactgtactggatcatacagaggatttcttcaacctttgtattgatgcattttcaggctttaacggaaaagtcgtcatcgctgccggagaaaaagcggacctgaccaaattaaagcaggcgccggaaaactttatcattgctccgtatgtccctcagctggaagtgctggagcaatcggatgttttcattacacacggcggaatgaacagcgtaaacgaaggcattcatttcagcgtgccactggttgtcatgcctcatgacaaggatcagccgatggtggcgcagcgtctctctgaactccatgcaggctatgtcatctctaaagatgaagtcaatgcccaaatattaaaacaggccgtagatgaggttttgcgcaaccatcagtatacggcaggcattaaaaaaatcaatcaaagcttcaaggaatgtatggacatggaagaagtgatggagcgggttgatgagttgattcgccaaaaaaacaaataagaaaaagaactcccgtaccttgtacgggagttcttgatttaaaacttgattttgattttttgagcatcactgattttcttatggttatggtcaaagacgtcacttgtcgtgatttcgatccacttgatctcttttgttttcttctcagcatccgcggccttatcatgagcatggcggcttgatgcgttcacaataaagccgagatttccagacttttcggcgccgccttccaattcgccgtttaactcttcaagataaatatctttgttccaatcaaaggtttcgcccgtatttgttttcatcaatgcaatcggcgcaacatttactttttttgaagaggtgttcttgatatcaacgaaaaccttaacgaaatcaaactcttcatcgtgtgttaactcatgaaagtaatcaatcatgctgtagtccgggcgcaagtggatcagcttcatttcttttactgttaactccacgtcgccaatcttataggttttgttcacttgtttgatatcttttaagacagcttttcctttatcatctgaaaacgtttggccgaccttaagcaatgaccggtcatcagttacctgggaattaggctgataattatctgtgctgtccttctgggatgaagtgctttgcggctcagcttttactgttttctccccgcctgcatgctgtttttcagtactggcgtttgatgagcagcccgcaagcatgatagcaaaaacgaaaattgaaagaattcttctcatgatgattcctccattaaaaagagatcccgttacttcatacaagcaacgggacaccttgtaatcttttacttatcgttaatcttaatgttgtattgtaaagccttgaagacatttttggcgatttctgtattgtcgatttggccggcaaatgtctcactagacggaccgtatgcatagacgggaacatcttcaccggtatgtccgcctgttgtccatccagtgtgagagcgtttattaaagatgttctcgattgcgttatcgatatccagtacttccttcgattttgccgcttcttcaacagattgaatttcggcttttgttaaagccaatttcttttgatcgatatatgttttcaaagttttttcaacatccgcgccgtcagagatcttttctgccataaagtcaggtgtgcgctttgcggctttaatgggttcactgaaccagttgtagatgccgtccgcaccgatggaatatccgccggttgagtggtcagccgttgcgacaaccaatgtgtgcttgtcttttttagcgaaatcaatagccgccttataagcttgttcgaagtcttccatctcgctcatggcaccgacgatatcattgtcatggcccgcccagtcaatctggctgccttccaccatgaggaagaatccgtctttatccttgtttaattttttaatggctgtgtttgtcatatctttaagtgatggaatatccttcgtccggtcaatctttttaggcaggccgccgtcagcgaataggccgagaacttggctgtctttatttttcagcatgtccttgcgatcatccacgtagctgtaccccgcttttttgaattccttgatcaaattacggtccttacggtcaaaattgctctttcctccgcctaaaaggacatcaattttgtgcttgccgttgaccatctcatcaaaataatcatccgcaattgagttcatattttttcggctatggtcgtgtgaaccaaaagaggccggagtggcgtgtgtaatttctgaagtggccacaagtcctgttgcttttcctttttccttcgcagcttcaagcaccgttttggcttctgacccgtcgttatcaacggctatggcattattgtatgttttaattcccgcagacatagccgttgccgccgctgcagaatccgttacattttgttcaggatcatcgggataagttgtttgctggccgacaagatactgatcaaaagccgtaggctccacaacttttgtctttttattatcctttaagtatcgataagcggacgtataagacacacccataccatcaccaatcagaacaataacattcttaatttcgtcttggtttccctttttcttttcctgggcgctggcatcaggcacactgccgctggctaagctgctgaacgcaattgatgataaaaccgcgataggcagtaatttcttcgggaattttttcaactggataacctcctaaatatagatgaatctcaatgacaacccaattatatttttaaactgttaagctagtattaatcgattttaaagattggatttacaagaataatgaactgctatcaagagaaaggaaagagtgatagtactatagaaataaattggaggaatagatactggccgtggataggcggactgaaatctgctatagtcgcatagaagcaacccgcttacatctggaacaattttaagtattatgttggaaagaggtattgtgtaagcacatgtctgagcagttcatatggagtggcatcattttattttaggagggaacaacatggacgttttttctgagtatttagcgggaattgatgacccgttccaccgagaaagaacggaagaggtgttaacttggataaaaaataaatatccaaatttacatacagaaataaaatggaaccaaccgatgtttacggatcacggtacatttattattggctttagtgtttctaaaaagcatttagctgtcgctcctgaaaaagtaacgatagcgcacgtagaggatgatattgtgaaggctggatatgattacaccgagcagctgatacgtatcccttggaatggtccagttgattacacgctacttgagaaaatgattgagtttaatattctggacaaggcggaatgctccactttttggcgaaaatgaaggaaaaaggcataacatatgagctgtataaaatatgttacgccttttcatttgtctatttttcgttttgatcatctattgctgcttttcttcaaacaaggtcatttcattgagcgtaagctggctcgcagaataatgattaccttgtttccatttcacttcaatcgtaatatcatggccttcaagctcatgttcatctaaccgctctaaaaaagaaacggacttttcctttgcgcttccatcacgataagtgcctccagcataatcatgcatcgggatttccgtgtcagaactcagcagaatttcatcatccttttttacaatcagtgattccaaataagtgttgtctgtttcatgtggttcaccgatccaataaagttcgccgctgtattcattcggtgcatcttcattttttttgaaaacagcttcccaattctggtctttgctttctccctgccaattcggatactccaaacgaacatgatgaatcaggtgataggaaaaaaagatcaagcagagagcgattaataggaatgccgtgaaaatgagagggtatttataatgactggacataaaagactcctattcgtttaatcaattaccttcgaaaatagaatttcatcccgaatcaaaatgccgttttcagccacctcgggaatctccggcttgagtcggcgcgctttttcaactgcgttcggaaacacttcggcgaattgatagcctctcttttgataaaacgccatcgcatgtacattatcattcgttgtaataagctttattcgttgacaatgtgcatatttagccgtctcttcaacctgctggagtaaagctgtgccgattcctttattttcaatcatactatctaatgaaataatttcacaatctttcccatctatcaagtatgtaatacagccaatgatttcgccgctttcatttactgcggcaaatccatctaattcatcacaccgaaaaatgccgctggaaatcgccatctcgggtgtaccccaatgcttggcaaaaaaatcggtcaacatctgtttcgctatctcattgtttgggatgatcatcatcataacactcctctattgaaagattgcatatgtactatcaatataaacaatatataacaaaaaaaatagatgttgaggtgacggcatggaaatcagcgatgtcatttacgggcaccaccatatagacggagtgctggaagagcttatcaaaagcgctcctgtgcaaagattaaaagggatctatcaaggcggagcaagctttttagtcaatcgaagatggaatgtgaccaggtatgagcactccatcggcgtaatgctcctcatcaaaaagctcggaggaacgatagaagaacagattgcaggtctgctccacgacgtatcacacacagctttttctcatgtggtcgacgttgtctttgaaaatcaagcagaagactatcatgaaaacatctttcaacaagtcattgttcactctgaaatcccggacattttacaaaaacacggctatcatactgaagaacttttatctgacgattcaaggtggacattgctcgaacagcccgcaccggagctgtgtgctgatcggacagactatacgctgcgtgatatgtaccgatatggacacattaacctgcacgaagcgcaaacctttttggatcatcttattgtgagaaacggaaggatgtttcctgatagtattgaagccgccgaatggtttgtcagtgtgtactacaaggaagtaattgatttctttttgaatcctgtgaatgtatatggatatgaatatttagcgcgagcattgaaggcagcgctgcggcatgatgtcatatctgcagaggatctgctgaaaacggaccaagaggtactgaacatcctgcgtgcatcaaaaaatgaagaagtcctgagcttgcttacatccattcatcccggcatacaagtaatagaggatgacatccagtacgatttccatcaaaagaagaaaatgcgcctaatcgatccatccatttttcttgatgacaaatggatcaaatcctcagatgtttctgaaaaggtgaggaaaatgggtgaggccgcttatcaaaaagcaaaaaaaggtgtgtatataaaaatcttaaatcagtaattgccgcctgacagcggctttttttatgtttggctttgcaaacaaaggggaataggacaaactgcgggaacgcattatgagaatatcagcgtatttacataccgttcgggggtatagtattatcgagagggcatgttttcattgtctgcgggcaaaagttacaggaaaaaaatgaagcaaaggagaatgaacatgaaaatctctaaaaatgcactgggaattctgatgttatctcttgtttttgttttatcagcatgcggcaataacaacagtacgaaagaaagcacacatgacaatcattcagactcctcaacacatgaagagatggaccattccggatcagctgacgttccagagggattacaggaatctaaaaatccgaaatacaaagtaggcagccaggtaatcatcaatacttcccatatgaaaggcatgaaaggtgctgaagctacggtaacaggtgcctatgatacaactgcgtatgttgtttcttatactccgactaatgggggacagcgtgtggatcatcacaaatgggtgatccaagaagaaatcaaagatgccggagataaaacgttacaacccggagatcaggtgattttagaggcttctcatatgaaaggcatgaaaggagcaacagccgagatcaactccgcggaaaaaacaactgtatacatggttgactatacatcgacaacaagcggcgaaaaagtgaaaaaccacaaatgggtcacagaagatgagctttcagctaaatcataaaaaatcctccttttacaaggaggatttttttgctgtctgaacaggtcttgttaaagaaatgaaagcaaacaggacagcgatgatcacaattgacccgccgcaccatgctgttgacaccacagtacccgtttgatccaaaacaacaccgccaatggctgagccaagggcaattccgacttggagggccgatgtgttaaagctttgctgaatgtcagacgaatcaggtgcaatttcaattaaatagctttgctgagccggggcgaggctccagctcagaagaccccaaatcaccatcacaggcaaaaagaaaatcatagacgatgtagacagcggcagtaagaacataatgatagcaaaggaaccggtcaccagcaaaatgctcttaaaggaaccaagccggtcagatagcgctcctccgaaagggcctccgcatacggcagatatcccgaaaaggaaataacaaatgctgacccagaaagagctcaggtgaagagtctcttctaaaaacggcgcaaagtaagcgtatagcgtgtagtggccagctaatgtaaacatcgtgacgaggtgtgaactcgcgattttcagattaccgatcgtcttgagctgttcccggaaaggaatcattttctccgccggtattctttcaaagaagattgaaataatcagcatggagatcagcgccaacaggccgatgccaaggaacaaaatccgccacccgaaggaatcgctgattaagattccgagcggcacacctaatgcgatagcagagctgaaacccataaaaataattccgattgcgcgggctctgtattcaggcgctacaattttcggggcaatcgttaaagaaagtacaacaatcagccctgtactcatcgccgccaataccctagataccatcaatgttgcgaaattagggctgaagtaggcgacaagattgctaaggaagaaaacaaataaagcaattagatataagcgcttccgctcaatcttcgcagtcaatgccaaaagcagcggcccagatactgcatatcccagcgcaaacacactgatcagctgtccggctgaaacaatggaaatgtctaaatcatttgcgatctgaggaagaattccccccacaattaactcaaccaatccgactgcaatcgtagaagctgcaagcaggaaaactttgaaattcataacaaactcctttacttaaatgttttgataaataaaaaaaatcctgattacaaaaaatgtcataaacaaattttgtaatcaggattttacggttcctggtagacaccctcaaaccatattattgaggttatacaagtgttaatagctatttaattgattcgtttccgttgatgagtgtaccacattatgaatgaatcttccatagaaaatttacaaagtaatgaaccggacaagtgtatgattatatttattttataaaagtatagacatttaaaagtgaatgactataataatcaatgtaagcgttttaattacaaggggggatagcagttgaaaaaaatattactcgcgtgcagttcaggaatgtctaccagtttattggtgacaaaaatgaaggaatacgcacagtctatcggtgaggaagcagagatttgggctgttggccaagataaggcaaaagaagacatgagaaaagcggatgccgttttgatcggtccgcaaatgagctttctgaaaagcgagctccaaaaagaagcagatcaatacaacattcaagttgaagtcattgacatgatggcctacggaatggcagatgggaaaaaagcgtatgagcaggcattgtccttaatggtgaatcaataatggaacagatgaaaatcacgaatttaacagacgagcaaatcagttttcagctaatcctgcacagcggaaatgcccgaagctgcatcatacaatcactgcgcgcctataaagaagggaacaaggacgaggctgatgccctcattgccaaggcggagcaggatttatccgcggcccatgacattcactttcaaatgatacagaaggaatccggcggagaagcaacagctttttcattgctgcttatgcatgcagaggatcatctgatgtcaacattatccatgaaagaattagtgaaagagatgcttgatctctttaaaaccaagaatatataaaaaataggggtggatagggtgttcgagaaaatcagccaattccttgttccaattgcagggaggttaaacaataaccgctatttgcaagtgttgcgtgatgcatttatgctggctttcccgctgacgatattcgggtccatttttgtcgtgttaacgaatttgccgtttctaaacaaaatcatgaacgcctcaatgcttacgtcgtttcagtctcatttcggcattgcctccacggcgacaatgggcattatgtctgtctttgttgtgttcgggataggctattacctgtcgaaaagctatcaggtcgaagctgtatttggcggagcgatcgctttggtttcctttttgctcttaacgccatttatcattcagccggaaacaggtgatgccattacaggggttatcccggtcgatcgtctcggtgcaaaagggatgtttcttgggatgattacggcatttctttctggcgaaatttacagaagaatcgttcaaaaaaacctgacaatcaaaatgccagccggcgttccgcctgctgtagcaaaatcatttgccgcacttattccggcttttatcacattgaccgtatttttgctgattaacgtaatggtgactctgttttttaaaacaaatatgcacgacgtcatttatcacgcgattcaggctccgcttgtcggacttggaagcggtatcatcccaacgctgattgccgtgtttttcattcaaattctttggtttttcggactgcatggacagatcattatcaactccgtgatggacccgatttggaatacactgcaggtagaaaacctttctgcttacacggcgggaaaagaaatccctcatattatttcaaaaccgtttatggagatttatacagtagggatgggcggaaccgggatgacgcttgcggttgtgtttaccattctcatattcatgaaaagcaggcagatgaagcaagtatcaaaacttggcctcgctcccggtatttttaacgtaaacgaaccgattatcttcgggcttccgattgtcatgaatccgatcattattgtgccttgggtgctggcaccgatggttgttacgctcgtcacctatctggctatgtcagccgggctcgttccgcctccgactggtgtgacggtgccgtggacggttccattattcattaatggcatcatggcgacgaactcaatcatggggggcgtgatgcaacttatcaatctgctgattgtcttcgtgatctggtttccattcctaaaagcaatggataaattaaatctggcaaaagaaaaagaacaggctgtgcaggaaacagctgctcagcaaaatgataacagcataaaaatgtgacataaggggagagagacttggcacaaacagaacaatatcgttttccaaaggatttttggtggggatcatcggcttcagcaacacaaacggagggtgccgccgacagagacggaaaaggccagaatatatgggattattggtttgaaaaagaaccgcatcgtttttttgatcatgtcggacccgcagacacatcccaattttacgacaactataaagaagatatcaggctgatgaaggaacttggccacaactcgttccggatgtcgatttcctggtcgcgtttaataccaaacggaacgggcgagatcaacgataaagccgcaaatttctataacaatgtcattgatgagttgatcgctaacggaattgaaccttttgtcaatttgtttcatttcgatatgccgatggcgcttcaaaaaatcggcggctgggtcaacagagagacggttgacgcgtatgaaaactatgcaagaacttgcttccgtttgtttggcggcagagtgaaaaaatggttcacgcataatgaaccaatcgttcctgtagaaggcggatacctatatgattttcattatccaaacaaggtcgattttaaagaggccgtccaggttggatttcatacgatgctgtcaagtgcccgtgccattcaggcttacagggagatgaagcaggacggaaaaatcggcatcatcttaaatttgaccccttcatacccgagaagcagccatccggcggatgtgaaagccggggaaatcgcagacgcgttttttaacagatcttttttagatccatctgtcaaaggcgaatttcccaaagagctggttgacattttgaagcatgaaggctttatgcctgattacattcctgaagatcttgacatcatcaaaaagaacacggttgacctgttgggagtgaattattaccagccgagacgtgtgaaagcgaaagaacatcttccgaatcccgacgctccttttttgcctgacaggtattttgatccctacgtcatgccgggccgcaaaatgaatccgcatcgcggctgggagatctatgaaaaaggcgtttatgatattttgatcaatttaaaagaaaactacggaaacatcgagtgttttatctctgaaaacggcatgggggttgaaggtgaagagcgcttcagagatgaacaaggcatcattcatgatgattaccggattgaatttataaaagagcacctcaaatggattcaccgcgccatacaggaaggctcgaacgtaaaaggctatcacttatggacgttcatggacaactggtcttggacaaatgcctataaaaaccgctatgggtttgtatcagtcaatcttgagaaagacggagaaagaaccgtcaaaaagagcggaaaatggttcaaaacagttgctgagcatagcggtttctagattttcctaaaggtcaagatcttccggcaatcatcataacgaatagagatgacgaaaatccgcaacattgatgaaatagggaaaagaacttatgatatccgtaaaagcttatgtgatatcagactctaacagctgccggaggatgccaatgaataaatacgaaattattgcaaatgaaatgagaaatagaattaaaaataacgtatatccgatcgatcagcccattcctgatgaagtatctcttgcaaaagaatttaactcaagccgcatgacgatgaagagagccttggataatttagttgctgagggtctgctgttcagaaaacgaggccatggcacgtttattattcaatctgcaatacaggatgaccatgtacatgtagtcagcaatgagattctcggattgaccaacttgctgaaagataaaaaaatccaaagcaaggtcattcagtttgaagtgcaatttcccactgaggaagtggccgcccatttgtctattgatcaaaaaacaccggtttattatgtcgttcggcttcgaattgtagaaggtgaaccctatgtattagaaaaaacatatatgccgactcatttaataccgggcattaatgacgatgtacttcatgattcgatctacaatcatattacaaatgtgctgcagctcaaaatcgccggaacgcatcggaaaatcagagcctgcaaatctgatcatattgaccagcagcatctgggctgtaaacaggatgatccaattctggaagtggaacatgtgggcttcttagataccgggattccatttgaatattccttttcacgtcatcggcatgacaagtttgttgtgacttctgtaaacatacggcgctgattgcggagacaacaaggaggccatctgcatgcttggcggtattgaagcaggcggcacaaagtttgtttgtgctgtcggtagagaagatggaacgatcattgacaggatagaattctccacaaagatgccggatgaaacgatagagaaagtgattcaatattttcgccaattttcattacaggcaatcggcatcggctcctttggtcccgttgataacgataaaaccagtcaaacatacggtactattacggccacgccgaaagcgggctggagacactatccctttttgcaaaccgttaagaacgaaatgaagatcccagtcggatttagtacagatgtcaacgctgcggcgctgggtgaattccttttcggtgaagcgaagggtcttgacagctgcctgtatataacgattggcactggcatcggagcgggggctattgtagaggggaggctccttcaggggctgtcacacccagagatgggccatatttatatccggaggcacccggatgacgtataccaagggaagtgcccttatcatggagattgctttgaaggcttagcttcaggccccgctatcgaagcccgctggggaaaaaaagccgcggatttatcagatatagcccaagtctgggaactggaagggtactatattgcccaagcgctggctcagtatattttgatccttgcacctaaaaaaatcattcttggcggcggcgtcatgcaacagaaacaagtgttttcttatatctatcaatatgtaccaaaaatcatgaacagttacttggatttttctgaattatcagatgatataagtgattatattgtacctccacgtttaggcagtaacgccggaatcatcggcacgctagttttagcgcatcaggccttacaagcagaggtagcatccggggaggtgcgatcatgacgcatcctttatttttagagcctgtctttaaagaaagactatggggagggacgaagcttcgtgacgcttttggctacgcaataccctcacaaaaaacaggtgagtgctgggccgtttctgcacatgcccatggcccgtcggctgtaaaaaatggcccgctggcaggaaaaacactagatcaagtatggcaagatcatccagagatattcgggtttccggatggtaaggtgtttccgctgctggtaaagctgctggacgccaatatggatctctccgtgcaagtccatcctgatgatgattatgcaaaactgcacgaaaatggcgaccttggtaaaacggagtgttggtatatcattgattgcaaagatgacgccgaactaattttgggacatcatgcaagcacaaaggaagagttcaaacaacgaatagaaagcggtgattggaacgggctgctgaggcgaatcaaaatcaagcccggagatttcttttatgtgccaagcggtacactccatgctttatgtgagggaacccttgtccttgaaatccagcaaaattctgatacaacgtatcgcgtatacgattatgaccgctgtaatgaccagggccaaaaaagaactcttcatatagaaaaagccatggaagtcataacgataccgcatatcgataaagtgcatacaccggaagtaaaagaagttggtaacgctgagatcattgtttatgtgcaatcagattatttctcagtgtacaaatggaagattagcggccgagctgcttttccttcatatcaaacctatttgctggggagtgttctgagcggatcaggacgaatcataaataatggtattcagtatgaatgcaatgcaggctcacactttgtcttgcctgcgcattttggcgagttttcaatagaaggaacatgtgaattcatggtatctcatccttaatgaatgggggagttgcatttgtttaagaaacatacgatctctttgctcattatatttttacttgcgtctgctgttttagcaaaaccaattgaagcgcatactgtgtcgcctgtgaatcctaatgcccagcagacaacaaaaacagtgatgaactggcttgcgcacctgccgaaccgaacggaaaacagagtcctttccggagcgttcggaggttacagtcatgacacattttctatggctgaggctgatagaatccgaagcgccaccgggcaatcgcctgctatttatggctgcgattatgccagaggatggcttgaaacagcaaatattgaagattcaatagatgtaagctgcaacagcgatttaatgtcgtattggaaaaatggtggaatccctcaaatcagcttgcacctggcgaatcctgcttttcagtcagggcattttaaaacaccgattacaaacgatcagtataaaaaaatactagattcttcaacagcagaagggaagcggctgaatgccatgctcagcaaaattgctgacggacttcaagagctggagaaccaaggtgtgcctgttttgttcaggccgctgcatgaaatgaacggtgaatggttttggtggggacttacatcatataaccaaaaggataatgaaagaatctctctatataaacagctctacaagaaaatctatcattatatgaccgacacaagaggacttgatcatttgctttgggtttactctcccgacgccaaccgagattttaaaactgatttttacccgggcgcgtcttacgtggatattgtcggattagatgcgtattttcaagatgcctactcgatcaatggatatgatcagctaacagcgcttaataaaccatttgcttttacagaagtcggcccgcaaacagcaaacggcagcttcgattacagcctatttatcaatgcaataaaacaaagatatcctaaaaccatttactttctggcatggaatgatgaatggagcccagctgtaaacaagggggcttcagctttatatcatgacagctggacactcaataagggagaaatatggaatggcgattctttaacgccaatcgttgagtgaatccgtaatgtcacaattaagaaggtgctcaagaagtttcttgagcaccttcccactggattaagcattcatatcgcctaacccaggactgtgttcatttggtatttcaggaagcactggtacgggaaaccctgccggaggatctattacttgtaactctccgccatttcggcttggagatttcccttgatagatttcactgattctcgtttcatccaacctaaagttaaactgtgcattatgatagcctaattcgacatactttctgcactcaggatatttattaatgtcataattcggtacagggagcagcttcgcccattcaacgcccaatgtctcgagcgctttcgcgaatgcattctggtgagcattgtcgcgtacaatcagaaaagcaagtgtttcgcggaacgtctgattagagctcatttcataaattcttgttttttgcagcacacctgtcgactcaagaagcaggttatccagcaggtcagtaattaagtttccgtggttatacacccacgacccgttccacggattgccccctgcatcaacaggaagggaactttgcgctccaataatataatgatgaggattagcatgtttaaccgcttcatcaagtggcgcttgatctgcaccttgactgccgacaccttcaccgcctgattcatctaataaagcattgattgtgttttgaaccagttcaacgtgggcaatctcctctaaaaaaatgccgcgaagcagatcgcggtactgtttctgctttcctctgaaattagagctttggaaaaaaaactgcatcattgtacgcatttctccgtaatgaccgcctaatatctcctgcaggaccttagcagctgccgggtctggcttgtccggtttaatgatattaatcagttcctctttgtagtaatacataacacgcctcatttcttcttaagagattttcttatattatttgtaagatgagataaaatatatacatgataagcatgggaagacgtgaaagaagaaaataaaaaaatacatgaaaagtgttgaccaaatgaaacaagcatggtatattattaaacgtcgctgatgaacagcgtgaaacaaaacgaaaaacaaaaaagtttttctaaggtgtttacaagattttaaaaatgtgtataataagaaaagtcgaattgaaaaagattcgaaaaaacattttaaaaaaacttcttgacttcaccatcaaatgatagtatgatagttaagtcgcttgataagcgcccgtagctcaattggatagagcgtttgactacggatcaaaaggttaggggttcgactcctctcgggcgcgccatttaagataccacgcgggtgtagtttagtggtaaaacctcagccttccaagctgatgtcgtgagttcgattctcatcacccgctccattattgaatgatctttgaaaactaaacaagacaaaacgtacctgttaattcagtttttaaaaaatcgcacagcgatgtgcgtagtcagtcaaactactttatcggagagtttgatcctggctcaggacgaacgctggcggcgtgcctaatacatgcaagtcgagcggacagatgggagcttgctccctgatgttagcggcggacgggtgagtaacacgtgggtaacctgcctgtaagactgggataactccgggaaaccggggctaataccggatggttgtttgaaccgcatggttcaaacataaaaggtggcttcggctaccacttacagatggacccgcggcgcattagctagttggtgaggtaacggctcaccaaggcgacgatgcgtagccgacctgagagggtgatcggccacactgggactgagacacggcccagactcctacgggaggcagcagtagggaatcttccgcaatggacgaaagtctgacggagcaacgccgcgtgagtgatgaaggttttcggatcgtaaagctctgttgttagggaagaacaagtaccgttcgaatagggcggtaccttgacggtacctaaccagaaagccacggctaactacgtgccagcagccgcggtaatacgtaggtggcaagcgttgtccggaattattgggcgtaaagggctcgcaggcggtttcttaagtctgatgtgaaagcccccggctcaaccggggagggtcattggaaactggggaacttgagtgcagaagaggagagtggaattccacgtgtagcggtgaaatgcgtagagatgtggaggaacaccagtggcgaaggcgactctctggtctgtaactgacgctgaggagcgaaagcgtggggagcgaacaggattagataccctggtagtccacgccgtaaacgatgagtgctaagtgttagggggtttccgccccttagtgctgcagctaacgcattaagcactccgcctggggagtacggtcgcaagactgaaactcaaaggaattgacgggggcccgcacaagcggtggagcatgtggtttaattcgaagcaacgcgaagaaccttaccaggtcttgacatcctctgacaatcctagagataggacgtccccttcgggggcagagtgacaggtggtgcatggttgtcgtcagctcgtgtcgtgagatgttgggttaagtcccgcaacgagcgcaacccttgatcttagttgccagcattcagttgggcactctaaggtgactgccggtgacaaaccggaggaaggtggggatgacgtcaaatcatcatgccccttatgacctgggctacacacgtgctacaatggacagaacaaagggcagcgaaaccgcgaggttaagccaatcccacaaatctgttctcagttcggatcgcagtctgcaactcgactgcgtgaagctggaatcgctagtaatcgcggatcagcatgccgcggtgaatacgttcccgggccttgtacacaccgcccgtcacaccacgagagtttgtaacacccgaagtcggtgaggtaaccttttaggagccagccgccgaaggtgggacagatgattggggtgaagtcgtaacaaggtagccgtatcggaaggtgcggctggatcacctcctttctaaggatattatacggaatataagaccttgggtcttataaacagaacgttccctgtcttgtttagttttgaaggatcattccttcgaaacgtgttctttgaaaactagataacagtagacatcacattcaattagtaatacaagatatcacaagtgattctttttaacggttaagttagaaagggcgcacggtggatgccttggcactaggagccgatgaaggacgggacgaacaccgatatgcttcggggagctgtaagcaagctttgatccggagatttccgaatggggaaacccaccactcgtaatggagtggtatccatatctgaattcataggatatgagaaggcagacccggggaactgaaacatctaagtacccggaggaagagaaagcaaatgcgattccctgagtagcggcgagcgaaacgggattagcccaaaccaagaggcttgcctcttggggttgtaggacactctatacggagttacaaaagaacgaggtagatgaagaggtctggaaaggcccgccataggaggtaacagccctgtagtcaaaacttcgttctctcctgagtggatcctgagtacggcggaacacgtgaaattccgtcggaatccgggaggaccatctcccaaggctaaatactccctagtgaccgatagtgaaccagtaccgtgagggaaaggtgaaaagcaccccggaaggggagtgaaagagatcctgaaaccgtgtgcctacaagtagtcagagcccgttaacgggtgatggcgtgccttttgtagaatgaaccggcgagttacgatcccgtgcaaggttaagcagaagatgcggagccgcagcgaaagcgagtctgaatagggcgcatgagtacgtggtcgtagacccgaaaccaggtgatctacccatgtccagggtgaagttcaggtaacactgaatggaggcccgaacccacgcacgttgaaaagtgcggggatgaggtgtgggtaggggtgaaatgccaatcgaacctggagatagctggttctctccgaaatagctttagggctagcctcaaggtaagagtcttggaggtagagcactgattggactaggggcccctaccgggttaccgaattcagtcaaactccgaatgccaatgacttatccttgggagtcagactgcgagtgataagatccgtagtcgaaagggaaacagcccagaccgccagctaaggtcccaaagtatacgttaagtggaaaaggatgtggagttgcttagacaaccaggatgttggcttagaagcagccaccatttaaagagtgcgtaatagctcactggtcgagtgactctgcgccgaaaatgtaccggggctaaacgtatcaccgaagctgcggactgttcttcgaacagtggtaggagagcgttctaagggctgtgaagccagaccggaaggactggtggagcgcttagaagtgagaatgccggtatgagtagcgaaagaggggtgagaatcccctccaccgaatgcctaaggtttcctgaggaaggctcgtccgctcagggttagtcgggacctaagccgaggccgaaaggcgtaggcgatggacaacaggttgatattcctgtaccacctcctcaccatttgagcaatggggggacgcaggaggatagggtaagcgcggtattggatatccgcgtccaagcagttaggctgggaaataggcaaatccgtttcccataaggctgagctgtgatggcgagcgaaatatagtagcgaagttcctgattccacactgccaagaaaagcctctagcgaggtgagaggtgcccgtaccgcaaaccgacacaggtaggcgaggagagaatcctaaggtgatcgagagaactctcgttaaggaactcggcaaaatgaccccgtaacttcgggagaaggggtgctctgttagggtgcaagcccgagagagccgcagtgaataggcccaggcgactgtttagcaaaaacacaggtctctgcgaagccgtaaggcgaagtataggggctgacgcctgcccggtgctggaaggttaagaggagcgcttagcgtaagcgaaggtgcgaattgaagccccagtaaacggcggccgtaactataacggtcctaaggtagcgaaattccttgtcgggtaagttccgacccgcacgaaaggcgcaacgatctgggcactgtctcaacgagagactcggtgaaattatagtacctgtgaagatgcaggttacccgcgacaggacggaaagaccccgtggagctttactgcagcctgatattgaatgttggtacagcttgtacaggataggtaggagccttggaaaccggagcgccagcttcggtggaggcatcggtgggatactaccctggctgtattgaccttctaacccgccgcccttatcgggcggggagacagtgtcaggtgggcagtttgactggggcggtcgcctcctaaaaggtaacggaggcgcccaaaggttccctcagaatggttggaaatcattcgcagagtgtaaaggcacaagggagcttgactgcgagacctacaagtcgagcagggacgaaagtcgggcttagtgatccggtggttccgcatggaagggccatcgctcaacggataaaagctaccccggggataacaggcttatctcccccaagagtccacatcgacggggaggtttggcacctcgatgtcggctcatcgcatcctggggctgtagtcggtcccaagggttgggctgttcgcccattaaagcggtacgcgagctgggttcagaacgtcgtgagacagttcggtccctatccgtcgcgggcgcaggaaatttgagaggagctgtccttagtacgagaggaccgggatggacgcaccgctggtgtaccagttgttctgccaagggcatcgctgggtagctatgtgcggacgggataagtgctgaaagcatctaagcatgaagcccccctcaagatgagatttcccattccgcaaggaagtaagatccctgaaagatgatcaggttgataggtctgaggtggaagtgtggcgacacatggagctgacagatactaatcgatcgaggacttaaccatatttttgaatgatgttacatctgttatctagttttgagagaacactctcaatttgtttggtggcgatagcgaagaggtcacacccgttcccataccgaacacggaagttaagctcttcagcgccgatggtagtcgggggtttccccctgtgagagtaggacgccgccaagcattacttttatcatcgcggggtggagcagttcggtagctcgtcgggctcataacccgaaggtcgcaggttcaaatcctgcccccgcaaccaaatatatgattaaataaggagtgccctaagggtacaactaaaataatcttatacaaatatggtccggtagttcagttggttagaatgcctgcctgtcacgcaggaggtcgcgggttcgagtcccgtccggaccgccattaatgtaaacgaaacgatcatgttttcgttttttttgtgttttcttttactgtatcttctgcttggtgtcatagccaagctttctttatatcgggaacatcttggatattccagcaaaattcgataaactaggaagagcacatataggcataagcagggttgaaaggagattttggttcatggatgaatttgatttgatacatagcattactccgcggaccattcaccattcttccgttgatgtaggaataggtgatgatgcagcgctctacactgcgaaacacggcgttcaggaaattgtttgtgttgatactatggtagaagacgtgcacttcaaattacactattcctcacctgaagatatcgggtataaggcgttagccgttaatataagtgatattgccgcgatgggaggcattccgaaattttatttggtatcacttgcggtaccttcaaaatggacggcatccgaaatcaaggcgatgtatgaaggaatgaatgaactggcgaaactatatcagatggatctgattggcggcgatacagtttctaccgctgacaaattagtcgttacagtcactgtgatcggtgaaattgaaaagggacaggcctgtttgcgcagcttggcaaaaccggatgatattgtgtttgtaaccggtgaaatcggttcttctgcagcagggctttctttattgctggaagagactaatcctcaaaactcatctgtggaaacggattactttatccataggcataaacggcctgagccaagagtaagcgtcggcagattatgctcgtgttttaaacgggcagctttaaatgatgttagtgacggattggctagtgaactgaacgagattgcagaagccagctgtgtttcaattgaaattgatgaaagcatgcttccaattcattctgatttacctaagcttcatcctaactggaaagaatgggctttgtttggcggtgaggattttgagctgacagggacggtttcaaaagaggagtgggaagtgttgaagcagcagtgcgcagcacgtcaacttcccattacaaagattggccatgtcagggaaaaaacaaaatctaaagtgatcctaaaaacagatcaaacatcaatgatcttagagaaaaagggatataatcattttaaataagacgggtgactcgtgtgaagcaattaaaatggagaactgtaaatccagaagaaacaaaagcaattgccaagcttgcggcagcgtttgctaaaccgggagacgtcctgacattagagggcgatttaggtgcaggaaaaacgacttttacgaaaggttttgcagaagggctgggaattacacgtgttgtaaacagtccgacttttacaattataaaagaatataacgatggcgtacttcctctttatcacatggatgtgtatagaatggaagatgaaagtgaagatttgggacttgatgaatattttcacggacaaggtgtctgtctcgttgaatgggctcatttaattgaagaacagctgccgcaggagcgactgcaaattgtcatcaaaagagctggtgatgatgagcgggaaattacctttactgctgtcgggaatcggtatgaaatgctttgtgaggagttaagtagacatgacaatattagcaattgatacatcaaattatacattgggcattgcgctgcttcgagaagacactgttatagcagagtacattacatatttgaaaaagaaccactctgtaagagcgatgcctgctgttcattcattgctgaatgattgtgatatggcaccgcaggacctttctaaaattgttgttgcaaaaggccctggttcttacacaggagtaagaataggtgtgacgttggccaaaacacttgcctggtctttagacattccaataagtgctgtatcaagtcttgagacgcttgcggcaaatggtcggcattttgacggtctgatcagcccaatctttgatgctagacggggacaggtgtacacaggtctgtatcaatataaaaatgggcttttagagcaagttgttccagatcaaaatgtgatgctggcagattggctggagatgctaaaagaaaaggaccgccctgttttgtttttaggccatgatacttctcttcacaagcagatgatcgaggatgtgcttggaacaaaagggttcattggaactgccgcccagcataacccgcgtccttcagaattggcttttctcgggaaggaaaaggaagcagctgatgttcatgggcttgtcccggattacttgcggctggcagaagctgaagcgaaatggattgaaagtcaaaagtagggtgataggatgaaaacaaaagcagcggtcagaaatatgcggcttgaagatatagatcaagtatacgaaatcgaagcatcctcctttacgtctccttggacgaaggattcgttttatcatgagctgctggaaaatccatatgctcattatctcgtgattgaaaaggacggccatcttgctgggtattgcgggatttggattgtgatggacgatgcccaaattacaaatatagcgataaaaccagagtatcgcggccagtctttaggagaaacgctttttcgctcagctgttgaactgtgcaaagaaaaagacgcaaggcggctttcgcttgaagtgagggtttcgaatcatcctgctcaaggcttatataagaaattcgggatgcagcccggcggaataagaaagaactattatactgataacggggaagatgcgttaattatgtgggtgacgataaatgagtgagcaaaaagacatgtacgtattaggaattgaaacaagctgtgatgagactgctgcagctattgtgaaaaacgggaaagagatcatttcaaacgtagtagcctctcaaattgaaagccataagcgcttcggaggcgttgttccggaaattgcttcaagacatcatgttgaacaaatcactttggttatagaagaggcgtttcgcaaagctggcatgacgtatagtgatattgatgcgattgcagtaacagaaggtccgggactggtgggagcgcttcttatcggagtgaatgccgctaaagcattgagctttgcacataacattccgttagtaggcgttcatcatatagccggtcatatatacgcgaaccgtcttgtagaagacatcgtgttcccggcactggcattggtcgtttcaggaggccatacagaactggtttatatgaaggaacatggatcatttgaagtcattggggaaacccttgatgatgcggcaggagaagcctacgacaaagtggcgcggacgatgggattgccatatccgggtggaccgcaaattgacaagctagctgaaaaagggaatgacaatattccgcttcctcgcgcatggcttgaagaaggctcttacaacttcagctttagcggattgaagtctgcggtgatcaatacgcttcataatgcatcccaaaaagggcaagagattgctccggaagatttgtctgccagtttccaaaatagtgtgatcgatgtcttggtaaccaaaacggcgcgcgcggcaaaggaatatgatgtcaaacaggtacttttagccggaggagtagctgcaaacagaggcctcagagctgcattagaaaaggaatttgcccagcatgaagggattacgcttgtcattcctccattagctttatgcacggataatgctgcgatgattgctgctgctggtacaattgcttttgaaaaaggaattcgcggtgcatatgatatgaatggccagcccggccttgaattgacttcttatcaaagtctcacgagataatagcgtgagactttttatctgtttgttattaacagataattcacaatttatccacatgtctgtgagtaattatagagatatagatggataaagggctgaagtcactgttaataaagtggataaattcagaatattttgtggatattgtgtataaagcgcttactttgttttgcttattagggtatgttctgtggataaaaagcacctctaaaaagaggtgcttgacttttttaatcttcttctgtggatagttcttcccattcggacaaaagagattccagctcctgattaagcttctcattgtctgcatggatagcttgtactttttcatgatcctgatagacttcagggtcacatagcaattcatcattgcggctgatgttctcttcaatggtttgaacagtggtttcaatttcttcaatccgacggagtcgttggcgctctttctttttccattctttttcttcctcgtaggaacgtttggagtcagacttcacagtagctggcgttttttcagtttcttcttgctgatttattttctccaattcaaactgctctgtttttttctcagtataataatcgtaatctcccagatactcctctatatggcttgaagaaagctccaatactcttgtggcgattctgttaataaaatatctgtcatgtgagacaaataacagtgtgcctggataatcaatcagcgcgttttcgagaacttctttgctgtctaaatccagatggttcgtcggttcatcaaggatgagaaagttggctttttgaagcatcagcttagctagagccaatcttgctttttcgcctccgctcagtgaatgaactggtttcagcacatcatctccggagaataagaaatttccgagacacgttctgatttctttttctgggagcccggggtactcgtcccacagctcatcaaggacacgtttagaggaagtcagctcagcctgttcctgatcataatagccgacactgacatttgagccgtatgagatcgttccttgatctggttttagggtgtctatcaatgttttcagtaatgtcgatttaccaattccgttagggccgacaagcgctgcgctttctcctcttgtgagcatgaatgacacttctgttaaaagcggcggctggttttcatagctgattgtgagatcctgaacacgaaggacttcatttccgctctgttttgtaatatcaaaatgaaagtttgcggatttttcatcgccaagcggttttgacatgacttccattcgctcaagctgctttctgcggctttgcgcccttttggtggtagaggctctcgccaggtttcggtctacgaagtcctgcagctttgtaatctcgccctgctgcttttcatacattttaagatctttttcatactgcgcggctttttggtcgagataagcgctgtagttgccgtgatactttttgctttctgctcttgatacctcgtatacctggtttactactttgtccaaaaagtagcggtcatgcgaaacgatgagaatggcgcctgaatagccttgcaaataatgctcaagccaggtaagcgtatcaatatccagatggtttgtcggctcatcgagaatgagcaaatcaggctgtgttaacagaagcttacctaaagccagtcttgttttctggcctccgctgaggctttgaacctgtgtagaatcgtcaaaatggctgaagccgagaccatgcagcacagatctaacatccgcttcatattgatagccgcctttatctttgaattcctgctgaaggcggtcgtaggttttcatgatgctttctaattcaccggggtcagctgccgccattttttcttccatagcccgcatttccttttccattgcttttaagtggtcaaaaacagtcagcagctcttcttttatggtaagcttagaatccaagccagtatgctgagcgagatatcccattgtaatatctttcggtttaataatttcgcccttttcatacgaaagctggcctgcgataattttaaggagcgtagattttccggcgccatttcttccaacaatggcgatgcgatcacgatttctgacttccagctttatattgtttaaaatagtatcagcaccaaacgatttggacagctgattaacttgtaagatcatcatattatttcacctctgctataataagttaagtgtagcttatgaaccagaagtcagcaaacaatacattggccatataagacatagagaagaaaatagtgtatgatctgtttaaggagcgttttaatatgaatggattttctcattttaatgaacagggcagagcccagatggtggatatcagcgaaaaatcttcgactgtccgtactgcggcggctgtttcaagcgtacacatgaagaatgaagtgtacgagaaaatacagagtcacgatatcggcaaaggagatgtactggctgtcgcacaggtggcaggcattatggccgcaaagcaaacgtcgaatatcattccgatgtgccatccgctttcattgagcgggatagatatatcgtttgactggaaaataaaagaagcagaagttatacttcatataaaagcacaggtcaaaacaaaagggagtacaggtgtggaaatggaagcgctcacttctgcatcggtgtgcgctcttaccgtttacgatatgtgcaaggctcttgataaggggatggtcatcggccctactttcttgctggagaagacaggcgggaaaaacggtgactttaaaagagaactatccgagtataatttggaggaccaaaaatgaataaggatcaatcaaaaattccgcaggcgacggcgaaacggctgccgctttactatcgctttttaaagaatctgcatgcgtcaggaaaacagcgtgtatcatccgctgaactcagtgatgccgtaaaggttgattctgccacgattcggagggatttttcctattttggagctcttggcaaaaaaggatacggatataatgtggattatttgctgtcttttttccgaaaaacgcttgatcaggatgagatgacagacgtcatcttgattggtgtcgggaacttgggaacggcatttcttcactataatttcacaaaaaataataacacaaaaatttctatggcttttgatataaatgagagtaaaataggaactgaggtaggcggcgtgcccgtctataaccttgatgaccttgaacaacacgtaaaagatgaatcagttgccattcttacagtgccagcagttgccgctcaatccattacagacagattggtcgcattaggaatcaagggaatccttaattttacgccggcccgtttgaatgtgccggaacacattcgaattcatcatatagatttagcagttgagcttcagtcactggtttattttttgaagcattattcagttttagaggaaatcgaatagagggaaaggaggagcccaaatatgccgatcggtcctggaagccttgctgttatcgcaatcgttgctctgattatcttcggtcccaaaaagctgcctgaattggggaaagcagcgggagacacacttcgtgaattcaaaaacgctactaaaggattaacgagtgatgaagaggaaaaaaagaaagaagatcagtaagttaggatgacacgaatgaaagtgaatcaaatgtcgctgctggagcatattgctgagcttcgaaaacggttgctgattgtagcgctggcgtttgtcgttttctttatagctggattttttttagcgaagccgattattgtgtatctgcaagaaacagatgaagcgaagcagcttacgcttaacgcgtttaacctgacagacccgctttatgtgtttatgcagtttgcgtttatcatcggcatagtcctgacctcgccggttattctttatcagctttgggcttttgtgagcccgggtctctatgagaaagagcgcaaagtaacgctcagctacattccgatctctattttgctgtttttagcgggcttatctttttcatattatattttatttccttttgttgttgattttatgaagcggatctctcaggacttgaatgtcaatcaggtgatcggaattaatgaatattttcattttcttctgcagctgacgattccgtttggactgctgttccaaatgccggtcatcctcatgtttttgaccaggctcggaattgtgacaccgatgttcttggcgaaaatcagaaagtatgcgtattttacgctcctggtgatcgcagccctgattacaccgcctgagcttctgtcccatatgatggtcacagtcccgcttttgattttatatgaaatcagtattctgatatcgaaggccgcctatcggaaagcgcagaaaagcagtgcagccgatcaggacgtgtcttcggggcaataataaaaaatccatttctcatgagagaaatggattttctttatttttggttctttttgattttaaatgaaaaggcgaacatcttaaaagaaatgctgatgttgtaagcggcgaacaccatcagcaggatggagtaaaatgaccacatgctgcctggcgagcttgcggcaagataagtaaagatgcaccctacggcaaagtagatcattccccaaactaccgggtttctcataaaaataatcctccaataatcaattgcatttgtgtgctctgctgttcaaggtaattccgaacaggctcaagctgcatgatgacgacgaatgtattcatcattaaatgggcgaaaatcggcacccatatccgttttgttctcgcatataaaaaggcaaaggtaaagcccattgctgtatatagaagaagatgcttcaaatcagcgtgaacaataccgaagataaccgagctgatcagtcctgcaaaaaagaaattcgttttttcgtacagcgcgccgaaaatgatttttctgaagatgatttcttctaatataggcccgacgatggaagaaacgataatcatgagcgggactgcctgaatgacatccagaatcgcttgtgtattttctgattctcttccgatgccaaaaacataatattcaatagagcctgctattccttgagagaaaagggcaatgaaaaaaccggctatcgcccaaaggatagaaagtccgattgagtccttctgtccgtttcgcagcgtttctttcggaacggttctcagaatgagcagaacaacaacgagacaggcgataaagctgataacggaccataatccttgtgcatgcagcatattttcatctgtaggctgtcctccggcataaccgaatttaaataacaagggaatcgcgattaatgcggaaaactgcatgatgatatatgtcaaaataataaaccaatactgttttctcaaatggtatgtactcctttgttaagtgggtttcgttcatctacagctattgtaacataatcggtacgggggtgaaaaagctaacggaaaagcgagcggaaaagaatgatgtaagcgtgaaaaaatttttatcttatcacttgaaattggaagggagattctttattataagaattgtgttagcactctttagtgctgagtgctaaaattacatattcatactattgaggaggttattacattgttaaagccattaggtgatcgcgttgtcattgaactcgtagaatctgaagaaaaaactgccagcggaattgtgttgccggattctgcaaaagaaaaaccgcaagaaggcaaaatcgtggcagctggttcaggtcgcgtgttagaaagcggagagcgcgttgctttagaagtaaaagagggcgaccgcattatcttctcaaaatacgcaggtactgaagtgaaatacgaaggtactgaatacttaatcttacgtgaaagcgacattttagctgttattggctaattcttaaataaacaatatttaaaacatttgaggaggtcttgtaaacatggcaaaagaaattaagtttagtgaagaagctcgccgcgcaatgcttcgcggtgtcgatgcacttgctgatgctgttaaagtaactttaggaccaaaaggacgcaacgtggttctagagaaaaaattcggttctccgttaatcacaaatgacggtgtaacaatcgctaaagaaatcgagctagaagacgcgtttgaaaacatgggtgctaagcttgttgctgaagtagccagcaaaacaaacgacgttgccggtgacggtacaacaactgcaacagttcttgcgcaagcaatgatccgtgaaggccttaaaaacgtaacagcaggcgctaaccctgtaggcgtgcgtaaagggatggaacaagctgtagcggttgcgatcgaaaacttaaaagaaatttctaagccaatcgaaggcaaagagtctatcgctcaggttgctgcgatctctgctgctgatgaggaagtcggaagccttatcgctgaagcaatggagcgcgtaggaaacgacggcgttatcacaatcgaagagtctaaaggcttcacaactgagcttgaagttgttgaaggtatgcaattcgaccgcggatatgcgtctccttacatggtaactgactctgataagatggaagcggttcttgacaatccttacatcttaatcacagacaaaaaaatcacaaacattcaagaaatccttcctgtgcttgagcaggttgttcagcaaggcaaaccattgcttctgatcgctgaggatgttgaaggcgaagcacttgcaacacttgttgtgaacaaacttcgcggcacattcaacgcagttgctgttaaagctcctggcttcggtgaccgccgtaaagcaatgcttgaagacatcgctgtccttactggcggagaagtcatcacagaagatcttggccttgacctgaaatctactcaaatcgctcaattgggacgcgcttctaaagttgtcgttactaaagaaaacacaacaatcgttgaaggcgctggcgaaacagacaaaatttctgcccgcgtgactcaaatccgcgctcaagtggaagaaacaacttctgaattcgacagagaaaaattacaagagcgtcttgctaaacttgctggcggcgtagctgtcatcaaagtcggcgctgcgactgaaactgagctgaaagagcgtaaacttcgcatcgaagacgccctgaactcaactcgcgcagctgttgaagaaggcatcgtatccggtggtggtacagcgcttgtaaacgtatataataaagtcgctgcagttgaagctgaaggcgatgctcaaacaggtatcaacatcgtgcttcgcgcgcttgaagagccaatccgtcaaatcgcacacaatgctggtcttgaaggatctgtcatcgttgaacgcctcaaaaacgaagaaatcggcgtaggcttcaacgctgcaactggcgaatgggtaaacatgatcgaaaaaggtatcgttgacccaacgaaagttacacgctcagctcttcaaaacgctgcgtctgtagctgcaatgttcttaacaactgaagccgttgtcgctgacaagccagaagaaaacgctggcggcggaatgcctgatatgggcggcatgggcggtatgggtggtatgatgtaataccgacaaaaaacccttgatttacaaggggttgtcggcaacggacgtcatttttgatgccctttataacttttcgaggcttctcatgagttcactgaacttgtgagaagcttctttttttctgtctttcgtagtttgattttttcagcactgttctatatcgattttcaatagttttgataatcccgatatgaactattcaattgaccaaaatacaaaattctaccggctcagattcctgtttacgtcttctttgataaacggcttactgtaacttcagtaaactgcatttctgttatgattataaaaagggtttaaaaatttttcgtccaaacctctgttacttctctccctattgcagacaggagatggtatcctctcatacagacaaaaaagccccagttttctaaataaatagtgtcaccaacactcttagaagtttccctaaggagtacattgccaaagagaaatcctattaaaatgtctatttgtgctgctttttagctactaagacgatgtatgttaaagatatagaacggcagaataatctgattctcaaaaattcactgtcggtgtagttaggttcttccaccaacatcttgataatattcatcccgactctatggagaccgacattccaattattaaatctaatattagttttttatgattaccaaggaggacttaatagtgcatttttcagaaatgatagatcgcttggctttatatgatttacacagaaaaagaagcaaagataaacatttttctgctgctattgcagccgatatcgatgatagagaggaattttacagtgcgaatatagctgatgtttcaattgatttgaatgaatctaaaaaaaagtatagggttggaacatttcgttatgaatccttaattcaaactgggaatcctgttaatgatactttaaaaggggaggtttttttacataaaaatgatatagatcaacccaatgttatctttgtacacggctggcgcatggaatcgtacaataggatcaaaagaatatttcataagcgtataatgaatgatttaggctggaacatgtattattattctcttccataccattttgaaagagaaccggaaaattcactgtatagtggcgagttgatgattagtgcgaatattgatcgtacaattgagtcgacaagacaggccattgtagatttacgggcattaattcactggataaaagcaaataaaaaaggccctgttatcatagtgggggtaagtttagggggatggatcactaatctaattgctaccctagaatctcaaattgatgtagtggtatcaatcttttatgccaatcgcctttcttattcaatatggaacacgatcccaggtaaattcataagagaagaattagaacaaaatggtgtgacctatgaagatttaacaaaatattggaatatcacagatcctagtcaagccttgccgaaagttaataaagataacattctgctgatttctgctaaacatgatcagtatattgacttaaaagatgcagattatttatgggaaagttgggagaaaccgaaaagatatgtctataattgcggtcattccggcattgttctttgtcgcaaaaagctggcaaatgatacgatttcctttataagagaaaggataaatacgggaaaacctggttcagtacatttgtagaccttaataagaaacaaaaggccaactgcaacttcagttggccttttctatttataataaagaaactgggtgagattgctgtcagaactactatgcgtactagtcgttttctttaatcaccattgccagttcttccacctcaccccgaatcccaatcgcaggctcccacgaatcaatcaaacgaatcgctctctgattagcttccatcgctttcgttttctctcctttacggttcaacagctgcgccatcccgtaaaaataatagatcaactcaacctgattggcgttatgtttgtcatagagcatttgctcaaaggcttcttccgctttctcaaattgaccacatttcacgtaagcgacacccagattgaaataggcttctatcgttttttcgccgccgtacgtggagctgatttcatttgccgcttcgtataattgaatggcttcttcatgatgacctctcgcaaagcttaagtcaccgcgaaccaaaagaactctgtgttgaatggtaggagaaattggttgatcttcgatttcgtttaaaatggtctctgctttttcctgttgcccgtcttttaaaaacagccttgctttgagtgcatgtccccaaacctttagatcataggcatcgtgagcatctgattgttcaagaatcttcagcccggcttctatttgctgtaaggccctgtctaaatcattgacttccatcagagcccagcctgctgtgtcgattcggaagtacgcttctcgtgtgtgttggcctaagtgatgggcggcgtcggccgctttgcgtccgtattcgattcgcaggggcaggttgattctgcttagaaaatggctaatgcgggtgatgagttcgattaggatttctttttgttcagtttcacttgcccattggatgacctttaagatgtttggccattcttttttcatttgatctaagttccgtcccagcaggtagctccaatagatagagttgggctgttcccgctttaaatgggtttcggcataatcaacataatagtgcgcccagcgattgcgggcttctttttcatattcgtgctgttcggacaagtgctgttctccgtaagcgacaacggtttggtgcgctaagtattgtgtccttccttcgcttcgttccggctgaatcagagcgtatgaccgcatttgttccatagcgtaatgaaaacggcgggcgtctaatccggctgctgccgccaggcttttttcatcaggcggcttgctgaaaaagcaaagcgtctgccagagctttcgtgtatcttcattgcatctgtcccaggtgcggccaaagaggaattcaaacaattccagcagtgagtagcctgcttttccaagctcatgaatcaactgctgcgcggggatgtcatcgtctgacatataggcgatgctgagtgccatggctttcgggtttccagcagtcgctgaaatgaattcgtttttcagatcagatgatagatgtaacagctgctccagcttttcccgcttatgtgggaggttgcatgtttgtaagcagcggtgcacttcttgctggaaaaatttcaaggcatctgtttggttaaggccgctcagctgaatagctgtcatttctccgaagctttcccgataagtttgctttacgttttcccgcgctgtgaggagaactttcacgccttgcggaaggctggtgataaattcatgaatgtcacgttctgcagtatcaatgctgtcaacgatcagcaggatcggtttttctctagtgtaattagctaacgcattgcggacgacgaatcgtttttcattgattgatttatcgatttgttctgtacgtccgagctgataggcgatcgtatttaaaaaatcgctaaagctcaatcctttccaatcagcgctgacccaaatgatactgttgaacgccggccaatctgaagtatcgtcgacacaggaataggctgcttcaagagcgattgtggttttacccataccagcccagccggtgattaaacagactggtgacggagaaagcatccattgccgtatcgcttccatatcaaagctgcgtccgataaagcgtccggaccagcgtgagggtaaattatgagtgataggctgttctgtaagcgcattcgtttcatggccgggtctgtcatgaaacagccgttttactacattttcaatttcgtcttcactcggagccccgaataatccgtcttttcgcagtattttcgcttttttcaaacaggatgctgcccatacaggcaatgcgggtttgatgactgggatagtggtggcttccagcaagtcggtcaaccactcgatatccaagtcggtcttttcgagaatgatccagatcattccgaacagttttccgtcgtcgattcttccgggaatgtagtttgctcccatctgtccgatccagcttttgatcgtgtttggggagactcccagctggagtgcgattttatctatgtaagactgtcctgttttttcattctttttccttctgattttataatcaggatgaagttttagcgttttgacgccaggtgccagcagttgtgcaaattgttttcggttttcaagttcagccataagcctgcacctcctattagtactattttatcaatccagcgttttttgtatatgaaaaaataaaagtacagtgccgctgtccttttatacagcaggaaaggctgttgaacgtgttgaaaagcagataaaatgggggcagtaacagagaaaacaaaaatgtatgcacttacattttattttctaaagaaaggaacttgccaaatgactcacacagtacctcaaaacatgaaagcggctgttatgcacaacacaagagagatcaaaattgaaacattgcctgtgcctgatatcaatcatgatgaagtgttgattaaggtgatggctgtcggaatttgcggatctgatctgcattactatacaaatggccgaataggcaactatgttgtggaaaaaccatttatccttgggcatgaatgtgcgggtgaaattgccgctgtcggatcatctgtcgatcaattcaaggtgggagaccgcgtcgctgtagagccgggtgttacgtgcggacgctgtgaagcgtgcaaagaagggcgctataatctttgcccggatgtacagtttttggctacaccgccggtagacggcgcgtttgtccaatatattaaaatgcgtcaggactttgttttctctatcccagactcactttcttatgaagatgctgctttgatcgagccgttttctgtcggcatccatgcggcggccagaacgaagctacagcccggatcaacgattgcgattatggggatgggccctgttgggttaatggctgttgccgcagctaaagcatttggggcaggcacaatcattgtcaccgacttagagccgctgcggttagaagctgcgaaaaaaatgggagcgactcatattattaatatacgtgaacaggatgcacttgaagagattaaaacgatcacgaatgatagaggcgttgatgttgcttgggaaacagcagggaatccagcggcattgcaatccgcactggcttctgtgcgccggggcggaaaattggcgattgtcggtttgccttcacagaacgagattccgctcaacgtgccgtttattgcggataatgagattgatatttacgggatcttccgttatgccaatacgtatccaaagggaatcgaatttctcgcttccggcattgtggacacgaagcatctagtaacggaccaatattctctggagcagacacaagaggcgatggaacgggcgcttcaatttaagaatgaatgtttaaaagtgatggtgtatccaaatcgctgagtgaacagggaggatcttcgtattctccctcttgtttactggaaatgaaaacggattcttggggtgggaaatgatgattgaaacagaaaaagtaacggcaatgaaagtgaagcatcagtcaaaatccagtaccggactgtcctggtttgaacgaatcggttatggattcggtgatatgtcgtataatattatctttcagtttgtaaacgcatacttattattttattatacagacgtcggcggcattcagcctgcggtgatcgcaactttgtttcttgttgtgcgtgtgctggatgctatttttgacccgatcatgggattgattttagataaaacgaatacaaggtggggaaaagcaaggccatatttgctgtgggtggcatttccttttgcgctattcacattcttatgtttcacgacgtctcatttcggtgagaccggaaatatggtatatgcgtatgtcacttatattctgcttgggatgtcctttagtatgcaaacgatcccggtgaacagcttaacggggcggatgacgaattcggtggaggaacgaacggttctgaccacaacccggatgattttggtgtatatcggcattcttttatccatttcctgtgcgacaccgcttgcaactgctatcggaggagaggatcaggcgtttggatttcaaatgacggcgctcatctatgcggctgtcagcatcgttttgaatctatttagtttcttttctgtacgggagcgaattcagcctaaaaagagaaaaaaacaagggatcaaaaagacattatccgttttattccgaaacaaacccttgcttatgttaatttcatcatttttggcttttgcgatcgggtttaatattaaactcagcacgatggtgtattattttacgtataacgtcaaccataaagagttcgtatttatgggcaccgttttatttttcggagcagcgctgatcagcaatttgtttattcctttcttttctgagaagtggggcagaaaacaagtcatgatcatcacggcagctctatcgcttatttcttatgccggcctgcattttacgccgtattcttccattacactcattttcatttggcttttcgtttcgggatttttcacaacgcctttaaatacgcttgcttggggaatggtggctgattgcgtcgattatgcggaatggaaaaccggagttcgcgcggatggtgttgtgatttcgagcatgagctttattaataagctgggtgttgcgttagccgggtcattttcggccatttacttaggaatcgccgggtatgtggcgaatacagaccagacagttgcgtcattgaatgcgattaaaaatatgaatgctttgattccgggatttttcattttgctttctattattcttatcgccttctatcctttaacggaaaaaagatataaacacatcatctctgagctggagcaaaggtctgcgagataaatagatgtaaaatttttaatattcaatgttgtatttatggcagaaagtaatatactgagactgtaatctagactttataaatgagtgtgataatatgcgtagtcattctgtagtttgtattggggaattgttgatcgatttcttttgtaccgatgttgacgttgatttaatggaagggcgccaattcctgaaaagtgccggcggggcaccggcgaatgtgtcggcagcaattgccaagctgggaggagacgccgctttcagcggaaaagtaggaaaggatccgtttgggtattttctgaagcaaacattggacgctgtacacgtcgatacctctatgctggtgatggatgagaaagcgcctacaacgcttgcttttgtttcattaaaacaaaatggagagcgtgactttgtttttaacagaggcgcggacgctttgtttacgctggaggatattgaccatgaaaaactaaacgaagcgaaaatccttcatttcggctctgcaacggcactgctatcagatccgttttgctcagcctatttacggctgatgtcgagtgcggaagacaatggacagtttatttcgtttgaccctaactaccgtgaagatttatggaggggaagagtctcagagtttgtaagtgttgcgaaaaaagcgatcgctgtaagtgattttgtgaaagtcagtgacgaggagcttgagattataagcggtgtgaaggatcatgaaaagggagttgcgatccttcatgagatcggagccaacattgtcgctgtgacacttgggaaaagcggaacgcttctttccaatggaaaagaccgtgaaatcattccaagcattccggtgacatcaattgactcaacaggggcgggagatgcttttgtcggtgcggctttatatcaattggcaaacacggatcagattcaatctgtagatgctaattttgtgaaactgcgtgagattgtgtcgtttgccaataaggtcggagctcttgtgtgcactaaaattggagcgattgatgcactgccgagcttggatgagattgaagtttctttgtaaacattgaagatgtttcttgaaagtctttggacttttggaggcatctttttttattgcttacatttttgttcgggtaaaaagttgtgtattttttgtttgaaatgtcattttttattaaaaaagtgaaacttttaacgataataaatagtatatgtaacaagggttaccgaatttgctttaggaggaacgatataatgagtataattggaagatttaaagatattatgtctgcgaatatcaatgctttattggacaaggctgaaaatccggagaaaatggtagatcaatatttaagaaatatgaatagcgatttggctaaggttaaggcagaaacagcagctgttatggccgaggagcagagagcaaaaagagaatatcacgagtgccaggcggatatggaaaagatggaaagctatgcaatgaaggcgctgcaagccgggaatgagagcgatgcgagaaaatttcttgaaagaaaaacatctttggagtcaaagctttctgagctgcaggcggcgaatcaaattgctgcaaccaatgccgcacagatgagaaagatgcatgacaaattggtatctgacattggagagctggaagcacgtaaaaatatgatcaaggcgaagtgggcagtagcgaaaacgcaagaaagaatgaacaaactgggcgcttctgtttcaagtacaagccaatcaatgtctgcattcggccgaatggaggacaaagtaaataaggcacttgatcaggccaatgcaatggctgaactgaacagcgctccgcaggatgatatggctgatctgactgcaaagtatgacactggcggttcaagccaggttgatgatgaacttgcggcgttaaaagcgaaaatgatgctcgataagtaatacataggaggccgcagctctcggctgcggcgtcattttatcataagatgtgagagggaacggtaatgataatatcttataagtgtccgaactgcggcagtgatatggcatttgacagtgaaaccggctcgttatcctgcagcagctgcggaagacaggacaatattgaaagccttccgaaagaaaacattgcggcacggttttctgatgatgaagcaaaagaatatcaatgtgaaaactgcggtgccgttttgatcacggaagctgaaacgacagcaacgacgtgcagcttctgcgggggtgctgcaatacttgccgatcgattatcaggtcatttggcaccggcgaaagtcatcccatttacaatcagcaagcaagaagccgagcaggcatttcgaaagtggtgcaaaaaaggccttctgacaccaagaggtttcatgtctgccgatcgcattaaaagcatcaccggcatgtatattccgttttggatgtttgatttaaatagtgaagtacaggtgagagcaaactgtaccagggtccaccggtatgaagaaggggattatatttgcacggaaacagagcactttgaagcatttcgtgatatcaatctcgattatttgaaaatccctgtcgatgcctctgaaaaaatgaaagacgaattaatggacaaattggagccttattcatacgaagagctgaaggactttcaaacggcatatttggccggttatattgcggaaaagtacaattataccgatgaggagctttttccgagagcaaaagagaaaatcagcagttatatagattcatacatccattctactttttccggatatacgtcagtcaatgtgagggacaaacatattcacacgaaaaacgtgaacagcttttacgttttgcttcccgtttggatggtcagttacgattatgaaagagcagagcatatctttgcgatgaacgggcaaacaggaaaggttgtcggaaagccgccgatcagtcgaggaaaagtggcggcatggtttagcggaatagcaggcgggacatttcttgcgttgaagctcgtctcattgatgatgggaggcggattttgatgcgtggattttttggaaaagcgatctttgttgtgctggctgttttcatcatgatgcctttactggggatcgaagcggcaagagcttctgaatcacagcagcatgtgtacgatcgcgctcatctattgtcaaaagcggagatcggaaaacttgaatctctctcggcagagctgggtgcaaagagggacactgatttcatcattattacgaccaaaagcacaaacggtgaagatattgcagactataccggcgatttttatgatcgttacggaaaaggcagtacagctattttaacgattgatatggcggatagagaagtattcatctcgggctacgaaaaagctgaaaagtatttggacaacagcaggctcaatagcatcagaaatacgatttcatctgatttatccaatgaaaattattttgaagcttttgagacatatattcagctttcctataaagatatgggcataaaaccgggagtaaaccccgacaacatattctttacatggtggtttcagctgattgctgccatcgcagtcgggggaattgcggtttcaatcatgctttatcatgcaggcggcaaagtaacggttaatggaaatacatatatggatcagcgtacgtctgatgtgattgatcaatacgacacttatattagaacgactgtaacaagagaaagaaaaccatcagataaagacagcggcagcgatggcggtgttacgaaaggcggcacgtcatacagtgggagccgaggcagtttctagtagaagaaaatagagaaagggagaggcgtaatgtcgtttttcagaaatcaattagcgaatgtagtagagtgggaagaatttagagatgatatgattttttataaatggaacaatcgtgaaatcaaaaaagggagccgtttaatcattcgtcccggacaggatgctgtctttttgaacaatgggcgggttgaaggagtctttcaagatgatggcgattatgatattgaatcagaaattattccattcctttcaacgttaaagggctttaagtttggctttaacagcggcatgcgagctgaggtgctgtttgtcaatacgaaggaatttaccgtaagatggggaacaaaacaggcgataaatattccggcagcgggaatgccaggcgggatacccattcgcgcaaacggcacatttaattttaaggtgcaggactatatcagcctgattgataaaatcgctggcgtgaaagatcaatattttgtagaggatattaaaacccgtatcatttctattctggatcagcttctcatgaagtggatcacaagagaagggaaagatatgtttaatcttcaagcaaacgcttttgatattgccaagggaattcaagaggacttggatatgcaattaataagcgacgggatgacggtcactggttttcaaatcatgagctttaattatcctcaagaggttcaagatatgattacaaagaacgcttcctatggtatggttggggatgtgaacagataccagcaaatatcaatgacggatggaatggcatccggaaagatgagcggaggcggagcggcttcggatatggctggaatgatgatgggaatgaatatggccaatcagatgatgaaccaaatgaatcaaaatcagcaggcacagtcatcaggcccacagtcaactggcagcggaagcaaaccgaatttctgtccaaactgcggaacaaaaacgggcgaagccaatttttgtccgaattgcggccagaagcttgtataagaatcatacagtgaaaagtccggagtgatcagacactccggacttttttatttaggagaataagcgttacctattgcttgctcctgaacaggccattttcgagcacccgcttggataattcccagcagcaattgacgacgttcctttattgaattgacggcaatttgaaatgtttgctttgataaagccggtatgcctgattgttgaagctttgagatatctggttccggcggcgcttgttctgcaggatggatataggcagtatgaacggtatccaggtagtttttgatacttgagcgcgcttctttgatgtgaagctgattcggctgatattgttcaggaattccgtatttgaaaatggttagagcctcatccaatacagcaacagctataatggatgattcctgatgctgcgtgctgtggtaaaaatgaaggatggggaaggcgttatgctgagcggtcagctttcccagttctgatgaggcagcgacaagaagaaaatcaatgtcgtgaaaatctttgccattccatgcattatggacgatttctgttccgtcatgtcctagacttaatacactttgggcaaaggagcgtttttgattaaccgcactcaagacggaaatcaaatacgtgacagaaaacgtgatggtaagcagtccttgagctgtttcaataatcgtgacaagcttccataggcctccgttcggagcgaggtcgccatttcctaatgtaaacatgacatagccggaaaaataaattcggtctgaccaggaagccggttcttttgattgagtttccataagtgagtgagggtcactcgagtaaatcaaaacccacccgctccaaaatagactgatccatatcactaacgtcaggcataacagcagaggaccagccatacttagaacctttgcgtggtcaccgctgattttgcggcaacccttccacagccaggcagacaggcatcttgtgatcgggccggcaccgctctctaaccataacgtggtccataaaaaatcaatcatccctgctgtcaataataaaaggcctgcaatgatataaccctcattcattttggttgcctcccttaagtcagccttcttttattttcttctctatttccttttatcctaagtctgaaacaattgaacgaatgtttgattttagatgaagttacccaaaacttactcatttatcgatatgaacagaaaatcacaggatttttgacttgattcacacatttttatgaagaaaaacgttcattttccccttgaattggtgattttccttttatagagtaaaaaattttcagaaatttatattgactgaaagcgtttttataattatgataatatcagatataacaaaaatgtcactattatattactacaattgaactatcaagtgactattaaatgccaaatttacaaggttatgcacaaagaaatgaccattgttcttttagcgagaaatgaaatcgtttccatcaggactgacatgctaagaagaagggaaggttatgaggttattggataaaaacatgaacaactattttctgaagcctgcttacgaaatgtgaggaaggcagcagccctggaataagtttttgacatacgcattttgaaaaagactgggggaaacagtatgaataaacaaggcaatcaaatgtcatttttacgtacaattattttagtctccacttttggcgggcttctttttggctatgataccggtgtgctcaatggagctttgccgtatatgggagagccggatcagcttaatctcaatgccttcacagagggccttgtcaccagttcacttctttttggagccgcgctaggtgctgtgtttggcggcaggatgtctgattttaacggccgccgcaaaaatattttgttcctcgctgttatattttttatttcaacgattgggtgcacgtttgcaccaaatgttacggtcatgattatttcccgttttgtgctcggtattgcggttgggggtgcatccgtaacggtgcctgcctatttagcagagatgtctcctgtggaaagcaggggacgaatggtgacgcagaacgaattgatgattgtatcaggacagcttttggcctttgtttttaatgcgatccttggaacaacaatgggagacaactcccatgtgtggaggtttatgctggtcattgcgtcacttccagccgtgttcctgtttttcggcatgatcagaatgcccgagagtccccgttggcttgtttctaaaggaagaaaagaagatgctttgcgtgtattgaaaaaaatcagggatgaaaaacgggcagcagctgagctgcaagaaattgaattcgctttcaaaaaagaagatcagcttgaaaaagcgacatttaaagatctttcagtcccatgggtgcgccgtattgtgtttattggattagggattgcgattgtacagcaaattacaggtgtaaattcgattatgtattatgggactgaaattctaagaaattccggtttccaaacggaagccgctttaatcggaaatattgcgaatggcgtgatttcggtattggcaacattcgtcggaatctggctgctgggaagagtggggcgccggccgatgctgatgacaggcttgatcggtacgacaacagcgttattgctaatcgggatattctcacttgtacttgaaggatcaccggcacttccatatgtagtcctgtcattaacggtcacatttcttgcttttcagcagggcgccatttcaccagtgacttggctgatgctatctgaaattttcccgcttcgccttcgcggactgggaatgggtgtcacggtattctgtctgtggatggtgaattttgcagtcagtttcacgtttccgatattgctggcagctatcggcctgtccacaacgttctttatcttcgttggattaggaatttgctctgtcctgtttgtgaagaggtttttgccggaaacgaaaggactttctcttgaacagctggaggaaaacttccgtgcttatgatcacggcggggcgaagaaggattctggggctgaagtgattggataattaaaaaaagaatccgcacccgagtgcggattctttttggtttcaaattagttaggtctgacaaggattttgacttggcttttctctttaataagagccccgaagccttcctcgatcaaatcatctagtacgatttttttcgttacgagtttgtcggctgagaaatagccttctttcattaatgacaatacagccgggaagatgtcacggtatccgataattccttttactgtacgttctttgattacgatatcgttcggatggatttcagcacctttttcccaaatgctgacgatgacggtttcaccggcaattgtagtggactggatggcttgtcgtaacaccactgggacaccagtgacttcgaatgctacgtcaacaccgcctcctgtacgttctgcaatctcagcgactacatcgtctgttttagacggatcaacgatgatcgcgccaagctcctcagctttttgctggcgttcaggagaaagctcaacagcgtaaatatcagttgcaccggcagccttcagcgcttcaatgacaagaagtccgatcgggccgcagccgaatacagccgctttgtcgcctgctttgagtttgcttgagcggacagcgtatagagcaactgcagaaggttcaacgagcgcgccttgttcatatgataattcatcaggaagtttgaacaaaagctcttcatctacagagacgtattcagagaaaccgccgcctccgccggctaagccgaggaatcccatttgttcatcaaggttgtaggcgccttggtggccgtgtgtagcaaaaatcggctcgactacgacgcggtctccaactttataattttcaacgccttctccgacttcgacaacttcaccggagaattcatgccccattgtgacaggtgccgtttcatttgttaatgggtgcggtttgtcaaccggaataaagatcgggccgcccagatattcgtgtaaatcacttccgcagatgccgcaccatttgactttgatctttacttttcccggctccgtttttggctcttcgatatgttcaatacggatatccttttggttatgccatcttgctgccttcatggattaccactcctataacttttgatgtgagtaattccgcaccggtcaatatgaactgttcacaaaatcgccatttttaaaaccaaaaaagaaatgaaatttttatataatataatctacgtttttttgaaaaaagaaactttgaagaaaaaagggtctcgcacactcttttttctttatatgagagtatcaatcgtttacatagctatgaatttggtttgaacaatacggtaatggttcgttcatattgaatgcgacaactactctatcaataattataacgctaatactgctattataataggataatcttccatggtttattttagcagagtaacttttttgactttgtaacattactgtaaggatattgaaataaaaaatagctggttgatcgtgtataatcttcctagatgttaacaaacagggggacgaaatgttgaagaaagtcattttagccgcttttatcttagtaggaagtactttgggagcttttagtttttcatcagatgccagtgcgaaacatgtgaacggaaatattacttggtataatggagtcgggaaaaaaggctcttcaggtaagaaacttggacattgggattgtgcgaccaaaatcggatttgatgttcctagaaacgggacaaaaatcagagcttatgcaaaagcgaagcctaaaaaggtgattacggtttataaaaatgatgttggcagaatgcctaatgcagtgctggatgttagccctaaagcgtttaaagcgcttggatatccattaagcaaaggtaaagtagcggggcattacagctattaatgtacatatataatctggaaagcaagaagtcacattcttgctttttctattggtggagataaaagatgaaaaaaagaatcatattattattagcagtgataatagcggcagctgccgcgggggttgcgttttatgttgcaaaggataaaggctatgagaaggctgctgatgtttcagtcaataccgaaagcggtgatgagctgctggtttcaattacagatacggatctgctgacaaagtattatgaaaatgacaaggtgatccatgaggagaagctgaccagctatccggcatttgccttggatcaaaaacagcaggtgctctattatacgggcaataatgaacagaatgaaatgaggctttttaaattggatctgaagtctcataaaaaaacgatgctttataaaggcgcggagagtgcggacagtttgtttttatcaaaggaccgttcaaccatctatttccgcttaggaaaagcggacgaaagcaattttcggatcgccgcttttgatctgaaaacgaaaaagtacaaaaatctttatcctgccgctaatgatcaggataacaccgtcagcagcttcttttataaccaaaaaaacgattcatttgcattgcttcattattctgtagaagaagactacaagaaaacagatgaagcaaacgaaaagggcatcgacccagaaccgacaacgattcattttgcggaaggccgccaaaataaatttaatgagctgaaaagcctgaaccaatttatcagcgatattgctgtttctgttgatgataaacgtattttattcacatcatatacgcaaaaaggaacggagcaaaccgcttctattcaaatgctcaatgcggatacgaaaaaatatgaaagcatcatctcaaatcaaaaatcatttaagctgttaattgacgcacagcctcagttctctaaggatggaaagaacatttattttcttgccgaagccaagggggctaaaaagctgaaggacgaaacagggcgtgaagctaaggtgcggacgatttattcctatagccttgaaaataagaccttcaaaaaagtatgggaaaatccgaacggcatcatcaacagcttttctgtgattaactaataaaaaccactcggcataagctgagtggcttttttaatggacgaggtgcagggctaatgattcgagccatttaaagatatgaatcagaggtaccgacaaaaacagaagttcaacatatgagttcattgcaacattcagctttttgaacgcagctctttttttcaagtctttttgctgctggtttgagatcacgttatcactcctcgtatatccatattataccattgaaacagacaaaaaaagccctaaacgtttacagttttgggcttctttcttcgtatttggcctcttgcaatgagaggcttttattctgaaatatagaattttgtctccgttcggggtttgttgcttgcgggagactgcatttgttatagggaagaactagcttgttttcgtttggctgttgttttggagattcactaatgaacggatgccgtcgaccattttacttccgcacaaagggcacaatggcgtatcactgctggcgaagttttttcgggtccagccattacagtcttcttttgtgcattcccaagtactcacatcttcttttggcagcggttcttgatttcgtttgttatagtaagacataaagtcacttcttccctcatgtattttactgcacatttcttattgtctcatacttttccctaatctcctaattcctttttctttatgactttccaataaccccatctaaaaaggagaggagtgtgctgttaaaagcatctggctcttctaaaaacgggcaatggctgcttttaggaaaggtaacgagtgtcgcgtttggaatattgctgcgcaagtgttccccagctgctgtagagaaaaatttcttgtcttccccgaagcacagcaatgtcggcacattgatgttttggagggtgccccggtaatcagcggccgtttggttaaataaaatcgtgctagaaatggcagccggctgtttgaggatttctgccagcatccattctgtttcggtctcggcaggcggttctgcgaacatattctggatgaagctttcgtagaaaggcagcgggtcagtttgaatggcgtgcatcgctgtttttaagccgtcaaaatcaaatggaccatgttcccagccctcccattgatagtccgaagcggattgatcgatgatcacagcggcttgaatgttatcattcccaaactgattgagataatcccatacgacaaaagcacccattgaccagccggcaagaacgacatgatcaagctccattgcatttagaaattcccttatgtcacgggcatattgggaaatggtgtggccgtgaagcactttgtcagattcgccgtgtcctctaagatcaagacgaatacattgataattggcagaaagcgccgaaaattgtttgtggaaaaattgtccgctcatcagcaccccatgtataaacaggatcggcgtcccgctcccgtgtgtttcatagtaaaggcgtgtctgatcttctaatgtgatgtatggcatgtttctcctcctttagtttccatcatgagtatggctggctgctgttgagctgatgatgacagctgtcgcggctgcctgctgcgcttgaatggctgtttcgatagcggtgtatagtcctgattccatcagcagatttttctccatatgctcactgagatagaggctgacagcaattttaaaattcatttccttttgccatttaaaagctttttcctggtttaattcgtcagtgatgcacaaaaccgttttgatatctggctcttccagaaatgtgaggagagcaaggtctggataatgataatcctttggttttttgacagattcagtgatcgattgatatatctgtttgcaagcggaaacaagcatttcgggctctttttcactttgcaaggccagaatatggctgacctgatgtaagtactgtccttttttaaagccgttggctgccagcagctgatagcatgtttccgccttctgtagcgcctgcaaaccttctccgttttctccaagcagtacggcaagcggaacattctgagttgaagtgaggaaataatgatttttcttcatctgctgataaactgctagccccatgttcatctgttctttttggtttgtcgtttcagattttccggtgagcaagatcagagcggaaaggtatgtgaacatatcccgcttatatcctagcttcaccatttcattgtatacatcgataaaagtatgaaatgtttgttttgcctcatgctgaaaatgaatgtccagaatagatgcaacagtaaagcggtggtgtgaattgagtgttgagaagctgccgatgtttgatttgatatagctgctcaaatcataaaagcgctgaaaatcaaactctcttttattcacaatatatgcagaagaaatgagcattaatatctgatcgtgtgaaactttccattttaattttgattttaatttagcataaatggaaatgtattgctttattttttcatgtagatcgtgtgtgagcataaaaagcagctccttttgttgtttttacgtaatacgataaatagggccaaaggtttcataaagaaaaaacttgcctgctagaggcaagtttgtcggattatttatggggatctgttatatccatcggtctcatcatgtcatagtcttcatgctctagaatatggcaatgccatacgtatcgtccgctgtacggaccgaatgtcgccgcgattctcaggacttcacctgcatgcgcttgaatggtgtctttccagcccttttcacttggcggcggcgggacagccggaccggtataggacaattccccgctttcttgataacgggcgatatcaaacggccgccggtctaatacacggaaggagactagatgcaggtgaatcggatgtgttccgcgtgtcgggttgataatggaccatatttcagtagtgccgacttttggtgcttctgtgacgggatcgtgccagcgtttgttattaagcagaaggacgggtctgccgtattcgtcctgggtgcctgccagttttaacgttctgatgttttgtattctttcatgctgtaccgaagggtatgaggcgaggtacttcggctttctgctttcgtctttttgtgccaatggttttgtgactctgaattgcatgatattagcatctgtttcaggattgacgtcaccgccacagcccgcgctgtttgccaaaatgatcgattctccttcatatgctgtgaagtcaatgatgatatcgtaacgttcagcaggcgcaaggctgaaagaattcagtttaacagatcgcggcaggagacctccatctgaaccaatctgaataaactctccgccattatcgagtgacaggttataggttcttgtattggaggcgttgatgactcggaatcggtatttcctcggctcgacctccaagtatggccataccttcccgttgacgagtatggtttctccgcaaaaagccggaacgattgaaggattaggcagtgacggagaagggttttccggtgcgctcggataaaacaaagaaccgtcctcattgatcgtgcggtctgtgataagaagcggcacatcgtattcgtctgaaggcagttttaagcgtttttcctttgggtcatgaatgatataagcaccgacaagtccggcatagacatttagcctggtgagcgccatggcgtgatcgtgataccacaatatagccccgcgctgctggtttggataatgataaacctctcttttgaaataaggtcctgtttgttcaaagtctttggaaaaccaagcctcgggatacccgtcactgtcatctggcgtgacgccgccgtgtaaatgaacaacagtctttacctcggactcttcatgctggctgtcactgtgatgaatggtgtgatcaatcggaaggaaatgcgtggaaggtaggttattcatccattttacatatacgttttcatttcttttaacctcaatggtcggtcccggaaataagccgttgtagccccacaggcgggtcggagggagatcgcgatggagctgatgggtgcattcctccatggtcacttcgtagtatgttttttcttttgattgctgtactggctttagtgtatctgggattgggagagcatccacaaatttttcaagtgtcattttcatctgtccttatctaaattttccaaattggtactatagttaatgacaataaggacgtgatggttacaaaaaatcttcgtgctgcagactgcccgagaaagaaaataacaaaatcctaaacggcagtccgtttaggatttgatcagcattaaggcaggatatcgggttgctgctgtgtgactgggttggcagccgctttctcgctcaccttgcgttttctgaacacaaggtaagaaatcagaacgattcccgtgatgacgcctgtcagcagcagctcgtctctcatggaatcaataaacgccatggacactaaaattccacaaatggcgatgatggtcaagtaggttaggaaagggaagagccacattttgatcttcaatgcttctgggtttgttttttcgagttttttccgcattttcagctgggaaacagcgatgacaagatagacgagtaaagcgattgcgcctgatgagttgactaagaataaaaagacggtatccggtgaaaaatagttcattacgaccgcgatataagagaaaaatgtgccggccacaatggcttgtacgggaacgccttttttgctcaatttcataaaacggcgcggcgcttcgtttctttctgcaagtgaatacagcattctggatgtggtatacaaacctgaattcaggcaagagagtacggctgtgaggacgataaagttcataatctgtgcggctgcgggcactcctatatgctcaagtacagcgacgaaagggctttctaaaatatttgctgaattccatggcaacagcgccacgacaatggcgattgagcccacgtaaaagacgatgatgcgccatacaacggatctggtggcttttgtcacagattcgatcgggttggatgtttcccctgctgcaatggcaacgatttcagttcccataaaagagaagatgacaacgacaatgccgagcaatacggagctgatgccctccgggaaaaatccgcctttgcctgtaagattcgaaaaaccgactggctcactgcccggtgcaaagccaaaaataaaggcaaaaccaacgattagaaaagcaatgatagtcacaactttaatgagggagaaccaatattcaaactcaccgaaagacttaacggagtagacgtttgtcagggtgagcacaatggtcaagatcaaacttgtcagccacagcggaatatcatggaaccagtattgaataatgccagcaccggcaatggcttcgatcgagatgacgatcacccagaaaaaccagtacagccagccgattgtaaatcctgcccacggtccgatggcgtcgtgagcgtattgagaaaacgatccgctcgtcgggtttacggcagacatctcaccgagcattctcataataaaaatcaccaataatccggctaacgcgtaagaaacaacggcacccggaccggtcgagtgaatcactgaaccgctgcctacaaataggccggctccgattacaccggcaatcgaaatcattgtcatatggcgggtctttaattccttttttaatcctgattgagattggttcataagttacctccttttaaaatgcaatcattactgaatattatgataattgaaactctatcataaatatacagtttgtcgaaaattcatgtgagaaaatataacgttttatttcaaatttgtagtgttttgtttgcgctttcagcgaatgtgtggaaaaaatgtttcgttttttatttgctgtgtgattttgtgtactatttacaattcgatagaatgcgagaagcgctggtgtcattggatctgatgggctttttggcggagcaaataaattggatgagagaaaaagtgttccatcgtcactatttttctgtggcgggtgaatcatgtttctgtagacccactgcggttcagctttgtaagataataataggaaaatgtgagcggggaggaggttttgtatggagagatatgatgaactgaaaaagggagaatccggggcgctggtcagcattgccgcgtatcttgttctttccgcaattaaactgatcatcggttatctttttcactcggaagcacttacggcagacgggttaaataacacaactgacattattgcttctgttgctgtgctgattggcctgcgcatctctcaaaagcctcctgacgaagatcatccatacggccactttcgagcggaaacgattgcatcgcttatcgcatcgtttattatgatggttgtcggcctgcaagtgctgttcagtgccggagaatctattttttctgctaaacaagagacgccggatatgattgcggcttggacggcagcgggcggggcagtcctgatgctgatcgtttatcggtacaataaaaggctggccaaaaaggtgaagagccaggcgctccttgctgcggctgctgataataaatcagacgcattcgtcagtatcggcacatttatcggcattgtggctgctcaattccatcttgcttggattgatacggtcactgcgtttgtgatcggtctgcttatttgcaagaccgcatgggatatttttaaagagtcatctcactctttgacagatggattcgacataaaggacatttccgcttataaacagacaatcgaaaaaatctccggtgtgagccgtttaaaagacataaaagcaagatacttgggcagtacggttcatgttgatgtggtggttgaggtatcggctgatttaaatattacggaaagccacgatatagccaatgaaattgagcggagaatgaaggaggagcatgcgattgattattcgcatgttcatatggagcctttagaacaaaaataatggagcttcctgccacaggaagcttttttgtgtgttttggccagctttattggaaacaatttgctagaatcgtttttttatacagattgctttttgtggtaaagttaggttacattatgatgaattttgtagatgactaggaggaaaagaatggcatatcaagaagacctgcatcctttgctggggaaagcagttgaacatattaatagagtaatggttggaaaacgagacatcgccatactcagcttagcagcccttcttgcaaaagggcatgtgctgcttgaggatgtacccggagtcggaaaaacgatgatggtccgcgcgctggcaaagtcaatcggcgctgatttcaaaagaatccaattcactccggatttgctgccatctgatgtaacaggggtatctatctataatgcgaaaacgatggaatttgaatatcgtcccggcccaattatgggaaatatcgtgctggccgatgaaatcaaccgtacctctccgaagacacagtcggctttgctcgaagcgatggaagagggaagcgtcacggtagatggccatacgatgcagcttgccgctcctttttttgtgatggcaacgcaaaacccggtcgaatatgaagggacctatcctttgccggaagctcagcttgaccgttttttattcaaacttcggatgggttatccgtcctttaatgaagagcttgacgtcttatctcttcaggaaaaaagccatccgattgagacgcttgagccggttattgcaaaagaagacttcatctgtttacagagggaagtgcaaaatgtccgtgctgatgacagcattaaggaatatatcgttgaaattgtgcagaaaacgagacagcatccttctgttcaattaggcgtcagtccgcgcggctcaatcgccctcatgaaagcggcacaggcatacgcgctgctgcatcatcgcgactatgtcataccggatgatattcaatatttagctcctttcacgctgccgcaccggatgatgcttcatcctgaggcaaaatttgaagggattcaggcagaagcgatcgtaagggagatcatgtcagctgtgaaggtgccggttcaaaggtcgtcggtccgctgatgaataagaaatggcaatggctcgtatatggttggaagctgattatattaactttattgacggctgctgttttttcttatgcgatgtttcagggcggctttgtcagctggtttttgttttacgcgtttctcccttttgtcttgtatgccgggctgttggccttgtatccgctccgttcttttcaggcttcaaggcaaatggataaaacacaattgcatgcgggggacaggctgggtgtaacggttacgctgagaagaaagctgccattccccctgatgtatatggtgattgaagattgcctgccagaaggtatcgagtcattaaatcgagacggagccgcggccaaacggctcgtttttccttggtttaaacggagcatgacgatgtcgtatgaattagctcgggtaccgcgcggagagcatcactttcattctgtcagggtgcgaaccggggatgttcttggcttgattgaaaaaacagcattttttgagctggatgataccctgtttgtttatccattctatcagcgtttttcctatcaggtgaatgagaggcatcaggaagacggtgtaagcggttcttctcctattcatcagcaccattcctcagtcgcagcaagtgtgcggaattatcagccgggagaccgatttgctgcgttagattggaagacatctgcacggcggagccagctgatgacgaaggaatttgagccttctcgcagcaaaaatctgtttctgctgatggaccgtttttcctcagacgcattcgaagaggtcgtttcagtgacagcttcgattcttcattctgttttaaaaaacggcgcgggtgctggtctggcttccatcgggaaggaaaaaaacattttccctattcaggaaggggatcagcattttaagcacatgcttcggcatttagccatcgctcattgtgatgcggcagacccgataagccgatatgcacgggaagagctgggaaagccatctgttcgccaagctgatcaagttgttgtcacgggacagttaacggaagatatgctgcacctcgcagaaataggaggcggccgggttacggtgatactggcaaaagagaaagatgctgagctctctcaagctgaaaatgtcatgattgaacgcatgatgaaacgccaaatcagagttcgggtcatgaggggcgggcgagtttcgcgtgttgtttagaaagagaggtgactggttcacatgccgcacgatgatcacaaggggagccgtttgagcttgctgttattttattttctggcttttttattgctgtgggagtggctcaggccgcttgacagttttactgaaacgaaacatacaggcttttttagtgtctttatcggcttgacgtttctgctgacttttttcaggatgaggtggtttgttaccgttcctttttgtgtcttatttacattgatctcgatacacatcctgttttatcaaggatctatattcgacttgagctgggtcagctcttttttgcaggatgtctatctgaatatcacgctgattcaatctgggcaatggaatgacatgattccttcatttcggaccctgctgttttttgtgctgctgtggctgctggtctatctcctgcattattgggtgatttaccagagaagaattttgtttttctttatgatgacagtagcgtatattacgattcttgatacctttacgccatatgatgccacttttgccgtcatccgtatcgtgctgatcggcttctttatgctgggccttttatacttggagcgcattaagctgatggaaagaatcacactgccaaaaacatctgtcctgaaatggtttcttcctttatctgtattggttttggctgcaacgggattcggactcgccgctccaaaatcagatccggcctggcctgatccggtgccttttcttaaaaaaatcactcatcaagaccgcgtgtctgcaggggaaagcaaaatcggatacgggaatcatgatgaatcactcggcggcccgttccagcaggatgctacacctgtttttacatggcagggaaaagagcgtacgtatttccgtgtggaaacgaaggatacgtataccgggaaaggctggattgaaacagacacaggcatgtcgtatcagcttagcaatggaaaagttgaaaatctgtggtttgaccataaggttgcgacagagcgccgcaccgtccgtgtaaaagtcgataagcactacgggtataatcatctgatgtatccgattggtgcggaaaccattcagccaaagcaggctgtctcacttgaaatgaacggcaacacggagcaaatttctccgatcagtgaacaagccggtgaaatcagaaatatgggaaattatactgtaacgtacaattccccggtctataagctggatgaactgagaaaggtaaaagtgagaaaaaacagtgaggagtacacattcagcgatcgctacatgcagcttccagattcactgccagagcgggtgagaacccttgcgatcaaactgactcaggatcacgacaatatgtttgataaggtgaaagcggttgaggactatttagggtcaaatgcgttcacatatgaaacagaaaacgtgaccattccgaagaatgatgaagattatgtcgatcaatttctctttgaaacgaaaatgggttattgtgataacttttcttccgccatggtggtgctcttgcgctcggccgggattccggcccgctgggtaaagggttatacgtccggcgaatacaaagaagcaggaaacaaaaatggcaacatctacgaagtgacaaataacaatgcccattcctgggtagaggtgtatttcccggaacagggctgggttacatttgagccgactaaagggtttacaaatccggctgaatttacttcttctcacacaaaggactccggcaacgataacagcagctcgccgaagaaagcaaaacagaaagaagaggaaaaacagccgcaaaaagaggaaaaacaaaaggaaaagcgggagccagctgtttctaaaaagccgtccgcttcgcatactaatgccggtgcgggcttgtatgcagcgcttgcggttcttgcagtcctcttggtggcagctgtattgctgtatgttttccgctcgttatggattcctgttttcaccgtgaggaaattgaagcggcgcagcgatcagcacgcgttttttgaggcatatgacgcgctgctgaaacaactgaagagaaaagggctgccgaaacgaggcagtgaaacgctgcgtgattatgcaaaacgaatcgatgaaaaatacgacatagaagacatgtcaaagctgacattaagctatgaaagggcgctttacagaaatgaagattcttcagcgctttggaatgattccagagagttatgggaaaatttaattaaaagaagatggtcttgaccgcttatcaacgtgttgttagaattagtgaatattatcggagtctgggagcgagttggcctgactccggcaaacggccttgccaaagagggcggagcgagcttcatatctgtcctcgtttttttctgtgtcaaaaaacttagaggagattaggtgacaaccatgacaaagttagtgaatgaaatgattcttgtccttgatttcggcagtcagtataaccagctgattacacgccgtatccgtgaattcggtgtttacagcgagctgcatccacatacattgacggctgaagaaattaaaaaaatgaatccaaaaggaattattttatccggcggtccaaacagtgtgtatgatgaaaactctttccgctgtgacgagaaaatcttcgagcttgatattcctgttttgggaatttgctacggcatgcagctgatgactcattaccttggcggtaaagttgaagcggcaagccagcgtgaatacggaaaagcaaacatccgcatcgaaggcacacctgatttgttcaaagatcttccaaacgaacaagtggtttggatgagccacggcgatttggttgtagaagttcctgaaggcttcactgttgacgcgacaagccatcactgcccgaactcagcaatgagcaaagcggacaaaaaatggtatggcgttcagttccacccggaagtgcgccactctgaatacggcaatgatcttctgaaaaactttgtattcggtgtttgcgaatgcgaaggcgaatggtcaatggagaactttatcgaaatcgaaatgcaaaaaatccgtgaaacggtcggagacaaacaggttctttgcgcgctaagcggcggcgttgattcctctgttgttgctgttttgattcataaagcgatcggcgaccagctgacttgtatctttgtagaccatggtcttctccgtaaaggcgaagctgagggtgttatgaaaacattcagcgaaggctttaacatgaatgtgattaaagtagacgcaaaagatcgattcttaaacaaactaaaaggcgtttctgatcctgaacaaaaacgcaaaatcatcggtaatgaattcatttacgtgtttgatgatgaagcggacaagctcaaaggcatcgactaccttgcacaaggtacgctttacacagatatcatcgagagcggtacagcaacggcgcaaacgatcaaatctcaccacaatgtcggcggacttcctgaagacatgcagtttgagctgatcgagccgttaaatacgctcttcaaagacgaagtgcgcgcgcttggcacagagctcggcattccggatgaaatcgtatggcgtcagccgttcccaggaccgggactcggaatccgcgttcttggcgaagtaacagaagaaaaacttgaaatcgttcgtgaatcagatgcaatcttgcgtgaagaaattgcaaatcacggcttagagcgtgatatctggcaatacttcactgttcttcctgacatccgcagcgttggtgttatgggtgacgcaagaacatatgattatacaatcggaatccgtgccgttacatcaatagacggcatgacatcagactgggcacgtatcccgtgggatgtgcttgaagtcatttcgacacgtatcgtaaacgaagtgaagcacattaaccgcgtggtgtacgatattacaagtaagccgcctgcgacgattgagtgggaataagtaaataacaatgagaaaaacgtccctttttcaaaaggggcgtttttttgttaactttttgaaaccgtttcgacaatttttgtatctaacaacataggaggtggataaggtgaaggaagacagattgattacaaaggcgagaaaaggaaatgctcgggcctttgaaaagcttatgctggcacatcaggagactttatataaaacagcttatctctatttaagaaataaagaagatgcacttgatgctgtacaggaaacggcttataaagcttttataggtatagaaaaactaaaagagccaaagtactttttaacgtggctcacccgaattcttattaattcaatttttgcaatgaagaaaaagaagggggaattagttccgtttgaaagccatcatgacactggcacggaccaaaggaatattgaagaatatatagacttgcgcaatgcgctggatacacttgatgaacatgttcagttaacaattcagctctattattttcaagattattcgatttcaatgatagctgaacaaacaggaatggcagaaggcacaattaaaacccatttacatagagcgagaaaagcattgaaacaggagctggaaaaggaggatcaaaacaaatggacaaacaccaaatgaagcagatatttgataacattgaagtgccaaagaaagtactcaaaaaggcaatacatcaagctgtcgttcgtgctgaaaatgaaagtaacacaaggcgccgttttaaatgggcacgaactattacaaatggaatggctattgctgctgtggtatgtatattgtatttatcatctggtctttttcttccctctgtaaacaaagcgatggggagcatacccattgtcggacaaatttataaggattttcaagataaagttggtctatcattgtttaaaagcaatttggtcacagctttaaatgaaaaagcagactccaggggaatcactgtttcggtaaacagctcctattacgatgccgggcagcttgtgtataactttactgttgataacctccagtctgatgaaaaagagctcagttataatgtgagtaaagcgagttttaacaataatttttcaatcaactacgattccttaatgctcaaaaaattaaataacaaacaatatgctggtcaattaaggctttatacaaaagggacagaaataaaaaatggggataccgtgccttttgtgattactcatatcaatgaaatacagggaaattggagattcaaactgcctattaccaaaaagaatgcgagttatttagaaagctcaaaagtggtatcagtgcttaacaatcattatcaattttccaatattcaagtggagaacggaaagctcggatctgtccttcaatttacaatcgattatcaaggcgtagcaaagcatgatacggttgaaattaacgaagtcaaagatgatttaggaaacacatatgagatgacagcgtcaaacatccaacttggagaccgcaaaaaagtaaacgagagaacggtaagagcaaaaggacaaacacagttagaatcaccaattaatccaaaggcaaaaaagctaacattaatagcaaatattaaatctgaggcagagggcagtgaaattgtcccgctaaatgcagagatgccgtttcatgtttcagaaacaaaccatcaaaacatagggattgaaatcaataacattaaccaaataggaaagaaagtattggttcattaccatttcactggaattgatacctcaagcgtggacgaaaataaattagtgaatatcggtgaaacgattggccttggtgatataaaaaaaatgcaatcttggcctgatccagtaggtgattatgaagaaggttattatttgaaatggaataaagctgaagtgaagaatatggacacagccgaaatggtatctacttttgaactggatgacgcttatcttgataagctgtctttaaagcattttgagtttaatgaatacggtctgtatattgataaaggcgttttaaatgacctgattcaactaaagccattctcgtttactgtaccagtgcatcaggtgagtcagcctaccgaaaaaaaataatcataagttgaaaagccgtatgttgccatacatacggtttttatcattgttaccaatttagtcaatagacgaataaaccaatttttttaataagtaatgttcgttgtttatattgtcaattcaaaatgaacttggtacaatagacacagaaatcaaataagatgaattcgtataatcgcgggaatatggctcgcaagtctctaccaagctaccgtaaatggcttgactacgtaaacatttctttcgtttgatataaataaaacacgtttatttattcaaactgaaatccgtctgtagtcaagcgtcccaaaattattggggcgttttttatttggcgatttcaggacagaataaatagcaaagagtgaagggagtcaaatagcttgaaaaagtattttcagtttgatgagctgggcaccagctatcgcaatgaaatcattggcggattaacgacttttttatctatggcatatattttgttcgtcaatccgattacgcttgctttggacagcgtgaaagattttccggaggcgctgagaattgaccagggtgcggtctttacggcgacagcgctggcgtctgcagcaggctgtatcttaatgggattaatagcgagatatccgattgccatcgcgccgggtatggggctgaacgcgttttttgcgttttctgttgtccttggtatgggtatttcatggcaggcagctttgtctggtgtttttatttcaggtcttattttcgttgctctttctttaacaggttttcgtgaaaaaatcatcaacgccattccgcctgagctgaaattggcagtcggtgcggggatcggcctgtttattacattcgttggcttacaaggctcaggaatcattactgcaaatccttctacgctcgtcacgatcggaaacattcacagcggtcctgtgctgttaacgattttcggtgtgattgtcacggttattttaatggtgcttcgcgtgaacgcaggcgtgtttatcgggatgctgttaacagcggtagccggcatgattttcggtttggttccggttccgactcaaattatcggcagtgtgccaagccttgcgccgactttcggacaagcgtggattcacctcccggatattttctctgtacaaatgctgatcgttattttaacattcttgtttgtcggattttttgatacagctggtacacttgttgctgtggcaacacaagctggtttaatgaaggaaaacaaattgccgcgtgcgggccgtgcgcttttagctgattcatcttctattgtgatcggtgccgtgcttggtacgtctacaacaacttcttacgtggaatcaagctcaggtgtcgctgcgggtgcccggtcaggatttgccgcaattgtaacagggattctctttttactggctacgtttttctcgccgctcctatcagtcgttacgtcaaatgtaacagcgccggcgcttattattgttggtgcattgatggtggcgccgcttggcaaaatcgcttgggataagttcgaggtggccgttcctgctttccttaccatgatcatgatgccgttaacgtacagcatcgcgactggtattgccatcggatttattttctatccgattacaatggtgtgcaaaggaaaagcaaaagaggttcacccaatcatgtacgggctgtttgtcgtatttatcctgtactttatcttcttaaaataaggaatgaaaaaccagctgcaccggcagctggtttttttgttgcaatagataaaaccatttcatacgatataccgtcatgtagatgtgccgccatgctttacttaaatggaaatgacttgactgttcaggaaggcttcggtaccttatataagtgttttattttcttgctgaatggtattccgccgtatttttttgataggagttgctgacatgacggaagaaagaaaagaaacgtttgaagaagaaattaaccagagtgaaagaatagatgcagatgaagaaccgctatcgagaatgtccagaaaggcgagccggcaaagcaagcagaagcaaaaacaaaaacagaaaccgcgccaggaacgcggtgaatcaactgttaaagtcaagcttgcgtctgtttgggcagccatcaacagatattgcggttttgcgttctcgattttaaaatctccggcgaaaactgtcgtaacggatggtttttctcattataagtacggtctgatttcaatgcttatattcagtatcattttttcaattgggaattggtttcagttaaaggcaagctggaatcggccgctcggtttcggagaacgccatcatgctttctatgacgggtttttagttgttcttgtgtatttgctgatctttttcgcggtaatggtctttgctatatgggctgtctcccgctatatgatgaagcagaaggtgacgttcagagaagcggctgccgtattgggttcattgcttgtaccggtaattgctgtttcaatcctttggctgatctttgcgatcgtaaatattccaatgctgacagtactgtttacggtgctgatcttgttttccatcttttttatcatcgcgctgtatgtacagcgtgtgtaccaggcggcacaagatgcaccaattgattatatctattgtgtatttgcagtggttgcgatagcgctgctgtttacggcagtgacttggccgtttatttctgaatattttacggcgtcgctgattccgctttaatgaaaaaaccggctaatcctagccggtttttttatgtcacactttttacaaatatatctaaaaaacatagttgatttgtaggattaacccgtgtatgatggggaaaatgctgaaaacgtccagcgcaaaaacctttatgtttaaggaggatgatggacatggctgatgtgcttcgccgagcaattaaccaaaagaagcaatttttaaaaaccaaattactgctctcggaattttatcaaggaagaggggaacagcttgcggactacacgctgagtgagcttgagaaagaatacaagtcccttcagaaaatgaaaaaagagatctgacaatagatataaagaggtgagtctgctgaaaagcgggcttttttgttttgattttgaaaaggcgagaaagagggtaaactactactgttcaacgcataaaagcatgtcgaaatattttgcttaagcttacgggcgaagctgattgtaaacggctcatttctctagtagaatatgaatgctttgtgcaagctgaagagtagggggatgaataaaatgatgcaaaccatcttatcaaatgggatagccatggttctcataattctcattattaatattgtctatgtgtcattttttacgataagaatgattttaacgctgaaaggacagcgttatttagcggccggcatcagtacgattgaaatactggtttatgtgacagggctgagtctggtgctcgataacttagatcagattcaaaatgtaatcgcgtacgcgctcggttacggtcttggcgtaattgtcggcatgaaaatagaagaaaaattggcgcttggctatattatggtcaatgtgattacgaaggagctcgatcttgatcttccgaagcagctccgcgaaaaaggctacggcgtgacaaattgggtggcaggcgggcttgaaggcgaccgcacagcccttcagatcctgacgccgagaagatatgaactccagctatatgatacgattaaaacacttgattcaaaagcctttattattgcgtacgaaccaaaaacaatccacggcggcttctgggtcaaagcggtgaagaagaggagaattaaagaataatggcaaagccgaagaagaaaaagtttgaagtgacagagcagcaaacgattgatgcggtgcttcagcaaatgaaagaagaaggatatctgcctgtaaggcgaatggaagagcctatttttatggaaaaaaaggaaaatgggtcaattcagatcgttccgtgcgggaaaaaaatcgtatttgaagggaaattgatctaaaacacgaacattagtagaaagaatttttgtatcgttcgataatatcgttgacattatccatgtccgttgttaagataaacatgaaatcaaaacacgacctcatataatcttgggaatatggcccataagtttctacccggcaaccgtaaattgccggactatgcaggaaagtgatcgataaaactgacatggatatatcgcagaagcgaacgactgacgatacatgtaccatgcccggtttgtattgcttcctcataagtgcaatgcagagcgggtattttttattttctgaaaacaaaagcattagaaggtggggaacagaatgcagccgctagtaggaatcatcatgggaagcacttccgattgggagacaatgaaacacgcatgcgacatacttgacgaactcaatgttccgtacgaaaaaaaggtcgtttccgctcaccggacgcctgatttcatgtttgaatatgctgaaactgctagagaaagaggcatcaaggtgattattgccggtgccggaggagcggcgcatctgccagggatgacggctgcgaaaacaacactgccagtcattggagttccggttcagtctaaggcgctgaacggaatggattcacttctttccatcgtccaaatgcctggaggcgtgcctgttgcgacaacatccatcggcaaagcgggtgctgtgaacgcaggcctgttagcggcgcaaattttgtcagcatttgacgaagaccttgcccgtaagctggatgagagaagagaaaatacaaaacagacagtgttagaaagcagtgatcggcttgtctaaacaaatcatctatccgggagctgtaatcggcattatcggcggcggccagcttgggaaaatgatggctgtgtccgccaaacaaatggggtataaagtcgcggtcgttgatccggtgaaagattcgccgtgcgggcaggttgcggatatcgaaattaccgctcattataatgaccgtgaagcgattcgaaaattggctgaaatcagcgatatcatcacatatgagtttgaaaacatcgactatgatgcgctgcattggctgaaagatcatgcgtatctcccgcaaggaagtgagctgctgctcattacccaaaaccgtgaaacagagaaaaaagcaattcaatccgcgggctgtgaagtcgcaccgtacagcatcgtcaaaacaaagaatgaattgaaacaggcggtacaggagctcgggttacccgcagttctgaagacatgccgcggcgggtacgacggcaaaggccaatttgtgataaaagaagaggcgcaaatggagcaggcagccggtctgttagaacacggaacttgcattcttgaaagctgggtttcttttgaaatggaactgtcggtgatcgtcgtcagatcggtaaacggtgaaatttcaacatttccgacagctgaaaacattcaccacaacaatattcttttccaaagcatcgtgcccgcacgggtagagaaagggattcagcagaaggctgctgatctcgcagttaagcttgcagatgagcttaaccttgtcggaccgcttgctgttgagatgttcctgacagaggacggagagcttttggtcaatgaactggcgccaagaccgcacaattctgggcattatacgctggacctttgcgagacgagccagtttgagcagcatatcagagcggtatgcgggcttccgcttgggaagacagatttgctgaagccgggcatgatggtgaatcttctcggcgatgaagtgaagcttgtggaggaagacccggagcttttaaaagaggcaaagctatatatatacgggaaacatgaaatcaaaaaaggccgcaaaatggggcatattacatttatgaagcagcctgaagacgaatggattcaggagatcacaaataaatggatgaatagagacggaggacaagcagaatgatcgaacgttattcaagacctgaaatgtccgcgatttggacggatgaaaacagatttcaagcatggctggaggtagagattcttgcctgtgaagcgtgggcggagcttggcgtcattccgaaagaagatgtaaagattatgcgcgaaaacgcgtcatttgacatcaaccgcattttagaaattgaaaaggacacgcgccatgacgttgtcgcttttacacgcgctgtttccgaatcattgggcgaagaaagaaagtgggtgcactacggattaacgtcaactgacgttgttgatacggctctttcctacttattaaaacaggcaaacgatattttgctcaaggatcttgagagatttgttgacattataaaagaaaaagcgaaagaacataaatacacagtcatgatggggcgcacgcacggcgtacatgctgagcctacaactttcggcttaaaacttgcgctttggcatgaagaaatgaaacgtaatcttgagcgcttcaaacaagcgaaagcaggcatcgaggttggaaagatttctggcgctgtcggcacatatgcgaacattgatccatttgttgaacaatatgtctgtgagaagctcggattgaaagcagcaccgatttcaactcaaacccttcaacgtgaccgccatgctgactatatggcaacacttgctttgatcgcgacaagcattgagaaattcgctgtggaaatccgcggactgcaaaagagtgaaacacgtgaagtagaggaatttttcgcgaaagggcaaaagggttcatctgcaatgccgcataaacgaaatccgattggctctgaaaacatgacaggcatggcgcgcgtgatccgcggctacatgatgacagcttacgaaaatgttccattatggcatgagcgcgatatttctcattcttcagcagaacgaattattcttccggatgcgacaattgcgctgaactacatgctgaaccgcttctccaacatcgtgaagaacttaacggtcttcccggaaaacatgaagcgcaacatggaccgcactctcggccttatctattctcagcgtgtgctgcttgctttgattgacacaggccttacacgtgaagaagcctatgatactgttcagccgaaagcaatggaagcgtgggaaaaacaagtgccgttccgcgagcttgttgaagcggaagagaaaatcacgtcacgtctttctccagaaaaaattgctgactgctttgattacaattaccatctgaaaaatgttgatctgatctttgaacgtttaggtttagcatagaagaagcttttagcggcttcttctaagccgccgatgtttgaaaattcccaacattcgggttaggaggccttccgtgaatattgtgaagaatgaacttttatacgaaggaaaagcaaaaaagatctacaaaaccgatgacgaaaacacgctgtatgtcgtgtataaagactccgccactgcctttaacggcgagaaaaaagcagaaatcagcggaaaaggacgcttaaataacgagatttcaagcttgattttcaaacatcttcatacaaagggcattaacaatcactttatcgagcgcatttcggaaacggaacagctcattaaaaaggtaacgattgtgccgcttgaagtcgtggtcagaaatgttgtggcaggaagcatgtccaaacgtctcggcattccagaaggcacggagcttgagcagccgattatcgagttttactacaaggatgacgcgctgggtgatccgctcatcacagaagatcatatttggcttttgaaagcggcgactcctgagcaggtagaaaccattaagtccattacaaaaacagtaaatgaagagcttcaaagcattttcgacgattgtcatgtcagattaatagatttcaagcttgaattcggtttagatgcagaagggcaagtgcttttggcggatgaaatttctcctgacacatgccgcttgtgggataaagacacgaacgaaaagctggataaagatttattcagacgcaatctgggaagcttaaccgacgcatacgaagagattttcaaaagactgggaggcattcatcatgtataaagtaaaagtttatgtcagcttaaaagaaagtgtactagatccacaagggagcgctgtccagcatgccttgcacagtatgacttacaacgaagttcaagatgtgcgcatcgggaaatacatggagcttaccattgaaaaatctgaccgtgatcttgacgtgctagtgaaagaaatgtgcgaaaaacttcttgcgaacacagtgattgaagattacagatatgaggttgaggaggtagtcgcacagtgaaatttgcggtgattgtgttacccggctccaactgtgatatcgatatgtatcatgctgtaaaggatgagctcggccatgaagtggaatacgtctggcatgaggaaacaagtcttgacggcttcgacggtgtgttaattccgggagggttttcttacggcgattacttaagatgcggcgccatcgcccgatttgcgaatattatgccagctgtcaaacaagcagcggctgaaggaaaacctgttcttggcgtctgcaacggattccagattttacaggagcttgggctgctgccaggcgcaatgagacgcaacaaagatctgaagttcatttgtcgtccggttgaattaattgttcagaacgacgaaacattattcacagcttcctacgaaaagggagaatcgattacaatcccggttgcccacggtgaaggaaatttctattgtgatgacgagacgcttgcttcattaaaggaaaacaatcaaattgctttcacatacggctctaatattaatggaagtgtcagcgacattgccggtgtcgtgaatgagaaaggcaatgtattaggcatgatgcctcaccctgagcgcgcggtcgatgaactgcttggaagcgccgacggtcttaaattgttccagtctatcgtgaaaaattggagggaaactcatgtcactactgcttgaaccaagtaaagaacaaataaaagaagagaaactgtatcagcaaatgggtgtcagtgatgatgagtttgcattgatagaatccattcttggaagattgccgaactacacagaaatcggaattttttctgtcatgtggtctgagcattgcagctataaaaactcaaagccgattctgcgtaaattcccgacaagcggcgagcgtgtgctgcaggggccgggggaaggcgccggaatcgttgatatcggtgataaccaagcggttgtgttcaaaattgaatcacataaccacccatcagctctcgagccttaccaaggcgctgcgactggcgtaggcggaattatccgtgacgtattttcaatgggtgcccgtccaatcgctgtattgaactctcttcgatttggtgaactgacttcaccccgcgtgaagtacttgtttgaagaagtagtagcgggtatcgccggatacggcaactgtatcggcatcccgacagtcggcggagaggtacaatttgacagcagctatgaaggaaatccgcttgtcaatgccatgtgcgtcggtttaatcaatcatgaagacatcaaaaaaggccaggcgaagggtgtcggcaataccgtaatgtacgtaggagcgaaaaccgggcgtgacggaatccacggcgctacgtttgcttctgaagagatgtcagactcatctgaagaaaagcgttctgctgtccaagtcggcgatccgtttatggagaagcttttgcttgaagcgtgtctggaagtcatccaatgcgacgccttagtcggcattcaggatatgggagctgccggtttaacaagctcaagtgcagaaatggcaagtaaagccggttctggtattgaaatgaaccttgacctgattcctcagcgcgaaacaggcatgagcgcgtatgaaatgatgctttctgaatcacaggaacggatgcttttggttattgagcgcggacgtgagcaggaaatcatcgatatttttgacaagtacgatcttgaagcggtttctgtcggacgtgtgacagatgataaaatgcttcgcctgacacacaaaggagaggttgtgtgcgagctgcctgttgatgccttggcagaagaagcaccggtttaccataagccttctcaagagcctgcttactatcgcgagtttttggaaacggacgttccggctccgcaaattgaagatgcgaatgaaacgctgaaggcccttcttcagcagccgacgatcgcgagtaaagagtgggtgtatgatcagtatgactacatggtgcgcacgaatacagttgtcgctcctgggtctgatgctggtgttctcagaatccgcggaacgaaaaaggcgctggcgatgacgacagactgtaacgcgcgttatctctatcttgatcctgaagtcggagggaaaattgctgtcgctgaagcagcgcgcaacatcatttgctcaggcgcagaaccgcttgcggtcacagataaccttaacttcggaaacccggagaagccggaaatcttctggcagatcgaaaaagcggcagacggcataagcgaagcgtgcaatgttctcagcacaccggttatcggcggtaacgtatcgctttataacgaatcaaacggcacggcgatctatccgacaccagttatcggcatggtcggcctaattgaagatacagcgcacattacaacacagcatttcaaacaagcaggagatctcgtatacgtgatcggcgaaacaaaaccagagtttgcgggaagcgagctgcaaaaaatgacagaaggccgtatttacggcaaagcgccgcaaatcgatcttgatgtagagctgtctcgtcaaaaagcactgcttgacgcgattaaaaaaggcttcgttcaatctgcgcatgatgtgtctgaaggcggcttaggcgtagcgattgcggaaagtgtcatgacgacggaaaaccttggcgctaatgtgactgtagaagggggagcggcattattattctctgaatctcaatcccgcttcgtcgtttcagtgaaaaaagaacaccaagaagcgtttgaagcaactgtcaaagatgcggttcatattggtgaggtaacagctgacggaattctggcgattcaaaaccaagacggacaacaaatgattcatgcgcaaacgaaagagcttgaacgcgtatggaaaggagctatcccatgcttgctgaaatcaaaggcttaaatgaagaatgcggcgtttttgggatttggggacatgaagaagccccgcagatcacgtattacggtctccacagccttcagcaccgaggacaggagggtgctggcatcgtagcgactgacggtgaaaagctgacggctcacaaaggccaagggctgatcactgaagtatttcaaaacggcgaactcagcaaagtaaagggaaaaggcgctatcgggcacgttcggtacgcaacggctggaggcggcggatacgaaaatgttcagccgctcctcttccgttcccaaaacaacggcagcctggcgcttgctcataacggaaatcttgtcaatgccactcagctgaagcagcagcttgaaaatcaagggagcatctttcaaacctcttcggatacagaggttttggctcacctgatcaaaagaagcggacacttcacgctgaaggatcaaattaaaaactcgctttctatgctgaaaggcgcctacgcgttcctgatcatgaccgaaacagaaatgattgtcgcacttgatccaaacgggctgagaccgctatccatcggcatgatgggcgacgcttatgtggtcgcatcagaaacatgcgcatttgacgtcgtcggcgcaacgtaccttcgcgaggtagagccgggagaaatgctgatcattaatgatgaaggcatgaaatcagagcgtttttccatgaatatcaaccgttccatttgcagcatggagtacatttatttctccagaccagacagcaatattgacggtattaacgtacacagtgcccgtaaaaaccttggaaaaatgctggctcaggaatccgcagttgaagctgacgtcgtaaccggggttccggattccagtatttcagcggcgatcggctatgcagaggcaacaggcattccgtatgagctcggtttaatcaaaaaccgctatgtcggcagaacgtttattcagccgtcccaggctctgcgtgagcaaggcgtcagaatgaagctgtctgcggtgcgcggggttgtagaaggcaaacgcgtcgtgatggtggatgactctatcgtacgcggaacaactagccgccggattgtcacgatgcttagagaagcgggtgcgacagaggtgcatgtgaaaatcagttcaccgccgatcgctcatccgtgcttttacggcattgatacttccacacatgaagaattaatcgcgtcttcgcattctgttgaagaaatccgtcaggaaatcggagccgataccctctcatttttgagtgtggaagggctgctgaaaggcatcggcagaaaatacgatgactcgaattgcggacagtgtctcgcttgctttacaggaaaatatccgactgaaatttaccaggatacagtgcttcctcacgtaaaagaagcagtattaaccaaataaaacttgaaaaatgacataaaggcagcgcagttcggctgcctttctctttctgccctcattcggggagatattttgaaaagcgccttaaaggagtgaataggatgtctgaagcatataaaaacgcaggagttgacatcgaagccggatatgaagctgtaaaacgaatgaaaaaacacgtggagcgcacgaaacggcttggcgttatgggcagccttggcggttttggcggcatgtttgacctgtctgagctttcttatcaaaaaccagttctcatttcgggaacggacggtgtcggcacaaaattaaagctcgctttttccatggataagcatgacacgattggcgtggacgctgttgcaatgtgtgtcaatgacgtgctggcacaaggtgcagagccgctgtttttcctcgattatttagcggttggcaaagcggacccagtgaaaattgaacagattgtacaaggtgttgcggaaggctgtgagcagtcaggttcagccttagtcggcggtgaaacggctgaaatgccggggctctatacagctgatgaatacgatattgccggtttctcagtcggagtggcagaaaaggacgaaatcgtgactggagaaaacattgaagagggccatctgttgatcggtctcagctccagcggccttcacagcaacggcttttcccttgtcagaaaagtgcttctggatgatgcggagctggacctcgatacaacatatgagccgtttgaacgcccgcttggcgaggaattgcttgaaccgacaaggatttacgtgaagcctgtgcttgccgcggtcaaaagcggaaaaatcgacggcatggcgcacgtgacaggcggaggatttattgaaaatattccgcgtatgcttccggaaggcttaagtgcggaaattgatcatggctcatggccgatcccgccaattttttctttcttgcaagagtacggcaagctaaaggaagaagacatgttcaacgtctttaatatgggtatcggttttgttttggcagtcaaagaagagcatctgacagatgtgatcggaacgcttgaaagccatggcgaaaaagcctatttaattgggcgtgtgaaaaaaggtgaaggcgtcacattcggcggtgcggcactttcatgaaaaagtttgcggtatttgcatcaggaaacggttcaaacttcgaagccatcgtcacgcgtttgaaggaggagaactgggatgcgtcagcagcgctcctcgtttgcgacaaaccgcaggcgaaagtcatcgaacgggcggaagcattccacattccatccttcgcatttgagccgaagtcttatgaaaacaaggctgcatttgaacaagccatcattgaacagcttcgtcttcacgaggttgaattgattgttcttgccggctatatgaggctgatcggtgatacgctccttcaagcatatggaggaaaaatcattaacattcacccgtcgcttcttccggcgtttcctggaatcgacgcagtcggacaggcgttccgggcgggtgtaaaggtggccggaatcaccgtgcattatgtcgatgaaggaatggatacaggtccgatcatcgctcaaaaggctatcgaaattgatgagcatgatacattggaaacaatcgaacagcggattcacaagcttgagcataaatggtatccgagtgtgattaaacagctattaggattaaataacagaggtgaaaaggcatgaccattaaacgtgcattaatcagtgtttcagataaaacaaatctcgttcctttcgtaaaagaactgacagagcttggcgttgaagtcatctccacaggcggaacgaaaaagcttcttcaagaaaacggtgtggatgtgatcggaatttctgaagtgacaggctttcctgaaattatggacggccggttaaaaaccctacacccgaatattcacggcggccttctggcggttcgcggcaatgaagagcatatggcgcagatcaatgaacacgggattcagccgattgacctcgttgtcgtcaacctctatccatttaaagaaacgatttctaaggaagacgtcacatatgaagaagcgatcgaaaatatcgacatcggcggacctggcatgctgcgtgcggcatcaaagaaccatcaggatgtcacggttatcgtcgatccggccgattacagcccagtgctgaatcaaatcaaagaagaaggcagcgtatctcttcagaaaaaacgcgagctcgcggcaaaggtattccgtcatactgcggcatatgatgcactgatcgctgactatctgacaaatgttgtcggtgaaaaagaaccagagcaattcactgtgacatttgagaaaaaacaatcgcttcgctatggagaaaacccgcatcaggaagcaactttctatcaaacagctcttcctgtcaaaggctccattgcgcaagcagaacagcttcacggaaaagagctttcttacaacaacattaaagacgcggatgctgcagttcaaatcgttcgtgaattcactgaaccggctgctgttgctgtgaagcatatgaacccgtgcggcgtgggaacaggaaaaacgatcgcagaagcgtttgacagagcgtttgaagcggataaaacatctatcttcggcggcattatcgcgctgaaccgtgaagtggacaaggcaactgccgaagcgcttcacaacattttcttagaaatcatcattgcgccttcattcagccaagaagcgctcgacgtcctgactgcgaagaaaaatctccgtctgctgacgcttgacgtatccgccgctgttcaaaaggaaaaacagctgacatccgttcaaggcgggctgctgattcaagatttagatatgcacggcttcgatgatgctgagattagcattccgacaaaaagagagccgaacgagcaagagtgggaagacttgaagcttgcttggaaagtcgtgaagcatgtgaaatcaaatgcgattgttctcgcgaaggacaacatgacagtcggcgtgggagcaggccaaatgaaccgcgtcggatcggcaaaaatcgcaatcgagcaagcaggggaaaaagcgaagggcagcgcgctcggttcggatgcatatttcccaatgccagatactgtcgaagaagcggcaaaagcgggcgttacagccatcattcagccaggcggatcgatccgagatgaggattccatcaaaaaagcggatgaatacggcattgccatggtattcaccggcatcagacacttcaaacattaaggggatgaaaacgacgtgaatgtattaattatcggtaaaggcggaagagaacatacgctggcgtggaaggcagcgcaaagcagcctcgtcgagaatgtatttgcagctcctggaaatgacggcatggaagcttccgcacagcttgtaaacattgaggaaagcgaccacgcagggcttgtctcgtttgcaaaagaaaaccaggtcggcctaaccattgtcggccctgaggttcctttgattgaaggtctggtggatgaatttgaaaaagcgggtctgcgcgtgttcggcccgtcaaaagccgcggcgatcatcgaaggaagcaaacagttcgctaaggatttaatgaagaaatacgacattccgaccgcagaatacgacacgtttacatcctttgatgaggcgaaggcatatgtgcaggaaaaaggtgctccgattgtgataaaagcagatggacttgcagctggaaaaggcgttactgtggctatgacagaggaagaagcaattgcatgtctgcatgactttcttgaagatgaaaagttcggtgatgcgagcgcgtccgttgtcattgaagaatatctttctggtgaagaattttctctgatggcctttgtcaaaggggaaaaggtgtatccgatggtgattgcccaggatcacaagcgtgcgtttgacggagacaaaggtccgaatacaggcggaatgggcgcttactctccagttccgcaaatttcggaagaaacggttcgccatgctgtagaaaccatcgtgaagccggccgcaaaagcaatggtacaagaaggccgttccttcactggcgttttgtacgctggattgatgcttactgaaaacggctcgaaggtcattgaatttaatgcccgtttcggcgatccggaaacacaggtcgtgcttccgcgcatggaatctgatctggtacaggtgcttcttgatcttttagatgataaggaagttgacttaagatggaaggataccgcggcagtgagtgttgtgcttgcatcagaagggtatccggaaagctatgcaaaaggcacgccgatcggcagccttgcagcagaaactgagcaggtcgtggtcttccatgccggaacgaaagcagaagatggagagttcgttacaaacggggggcgcgtcgccaatgtgacggcttttgatgaaacgtttgaagcggctagagaccgagtgtacaaagcggttgatgaaatattcaaaccgggactctttttcagaaaagacattggggcacgcgctttaaaggctgcccaaaaataagtgaggaaaacccgcagaatagctgcgggttttttgttatcaaaaagcgggatggcagctggaagaagaaaggacaacgagcgtggttggttttccatgggccatcgaggcgtcaataaaatcctcaagcgtatgtaccgattcagtcacgacctttgtcacatagctgtacatccctgtgatgcggtggttttctgctacatcagggtgcgcttttgcaaaggcggcgtagtgcttgcagcttttcggctccatgagaatgaaagcggtgacatgcttgtttagtttttcataacagatattcgcgctgtacccggtaatcactcctttgtcttcaagcttcctgacacgctccgccgcgcttggcgaactgagtccgacaagctttcccagctcaaccatcgttaatctgccgtttcgctgcaaatgcgagagaatctgaaggtctgtatcgtccatttgtccggctcctttacatatttaggcgaatgaatgaaaattcctttgatcgtaaggtaatgctgttgatttaacttcattgtagcatatggatgccgtcttattttttctataataaagccatcaatcagagaggaggcatcatgttgccagaattacagcgctctattacttggatacaagggacggcgttaacgattggggcggttttaggatgcgggatattaatcctgccgtctgtcactgcggatacggccggtccggcttctttatttgtctgggtattcatgtcttttttatcttttcttctcgtcggcacgctggcacggcttgtgaaaattgcgcccagcgcgggaggaatcactgcttatgtgcagctggcctttcagaaaaaagccggggctattttgggctggatcatgttaggttccgttccgattggcgttcccatcatcgctttgactggcgcgcattacgtcagttacatcacagaggcggccgattggcagattacattgattgctggttgcatgctggctatatctattttgcttcatatgagaggcattcaactatcagcaaacatcagtacaatcgttatttgtgtcatcgtatttctgcttgtcacttctattgctgtgtcattgccacacgtcacgatagcagaattcaagccgtttcttccgcatggctggtctgccgctggatctgtttcagttatgatttttttctcttttgtaggctgggaaatgattaccccgttggctgaggaatttcatcgccctgaaaaagatgtcccgctcagcttgtttttggcagcgtcttgtgtggcagggctgtatatcatgctgtcatttgtgacggtggggactcattcatatggagagaatggagaaattgcatcgcttgccatgctcatttcaaaaggagcaggggaaagcggtgtatacgtcacggtatgtttagcgctgtttattacattcgctaccatccatgccaatattgctggtttttcaagaatggtgtacgcattggcgagagaggggcacatacccgtattttttggaaaactcagtgcgacaaaacgtacgcctatccgtgttttgacagcgatggccgcagtgtttggcttagtgcttgcggcgcatggtctgtttcaaatcgatttgacgactctgttgaaagggccgagcgcggcttttatcgcatcttacatatgtacaatggcggcagcactgaaactgctgggcaggagagatataggctggtggatggcgctcggggcatttgcggcgtgcgcggtgatttattcattcagcggctgggcactgctttatccggcagtgctggcagctgcaggatatttctatatgaaaacaaaggatgggcataaaaaaaagcttgatcacgttttgtgattaagcttttccatttatccgttttgatgctcgttatttccagaatcactgtgttgaaacatgtaggtcacaggacagaagcgcaagattcccgaacccgctttcatggcccccataaagatgtaaaagagatgcattctgcaccaaggttttttcgtaaactttgcactggcggctgacataatcgtcaatccgcaggcgattctgaacacggcattgatgagactgatgtttggcttcaaggaaatccgctccttttacttaaaaaagttttttaaccgaaccttcaaaaatttgtaacgtttttatcgtgcgtgatgaggaaggatgtgataccatgagtctaatacatgtaaaggagagtatgtgaatgtccgaacgcacctttaactggaaaaacaaagacatcagggcacaggttgatgttgtagactcaaagctgcttccaacgctccttttacggaatgctctcgtcttaaatccatatgtaaaacaatggctgaaaaaaaacatttggatttatcaggaccgcattgtttatgtgggtcatgaacttccgaatagagccgaagaaattcatacgattgattgtgaaggaaaatacattgtgccaggttatattgaaccgcacgcacatccttttcaaatatataatccccaaacactggcggaatatgtgtctcaatacggaacaacaacattcgtgaatgataacttatttttgcttttgcaaagcggaaaaaagaaagcgcttacgattttgaatgaactcaaaaagcagcctgtccagtatttttggtggtcacgctatgacctccagaccgaggttctgaacgaggaccacgtccttccatttgacgtcagaaaacagtggattgaacatccggatgtgattcaaggcggagaaatgaccggatggcctcgcctggtagatggtgatgatttaatgctccactgcatgcaagctacaaagaaacagagaaaacgcattgaagggcattttcccggcgcttctgataaaacgcttacaaaaatgaagctgttcggtgcagattgtgatcatgaagcgatgtcaggtgatgaagtgatgagaaggctggaactgggctattatgtttcccttcggaactcttccattcgccctgatgtaagaaaaatcttgcaagagctgcatgagaagggcttccgctattatgaccacttcttttacacgacagatggcgcaaccccgaatttctataaaggcggcatgacaaacgagctgattcgcatcgcgttagaagaaggcgtacctgcaatcgacgcctacaatatggcatcatttaatatcgcaaagtattaccaaatggatgattatttaggagttgtcggaccgggtagactggcatcgctcaacatactggaagatccgttaaatccgaatcccgtgactgttctgtcaaaagggactattctgcgtgaagacggctgtgatttgaaggcgtttacaaaggcggactggcacaaaggtggtcttgtcccgcttgagctttcatatgatatgacgatggatgacttgcagttttctatgccgatgggcgtgaaaatgcggaatgcggttattatggagccgtatatgattgagattgacaattcgatggaacagctctcgtttgaccatgatgaaagttatttgacgatgctcgacagacacgggaaatggcgcgtcaatacgatgataaaagggtttgcctcaagcgtgcagggatttgtaagctcctttacgacgacgggcgacattgtcgcgattggaaaaaataaagcggatatgctgctcgctttcgcccggatgaaagaaatcggaggaggaattgttttagcggagaacggaaacattttgcatgaaatcccgcttgccctgtgcggctgcgcctcttcggaagcgtatgaagaagtgcttgagaaggaacaaaagctgagagatcttttgactgaaagaggctatgagttttgcgatcctatctatacgctgctctttttgcaaagtacgcaccttccgtatatacgcattacgccaagaggaatcttcgacgtcatgaaaaaaactgtactctttccatcgataatgcgttaaaatataaaagagcagggagccgacatatgaaaaaatggatgacagtttgcgcgctgtgtttcgtgttttttctgctggtatcctgccagcagaaggatgctgtcccggatactgcaaagaagctgaaagctcctttaacggggctaaagactgaacagaaagtgactgaacgccgccctgttgctgttgtggtgaacaatcacccgaaggcgaggccgcagtcgggtctgtctaaagccgacattgtcatagaagcgctagccgaagggcaaatcacaagatttctggccattttccaaagccagatgcctgaaactgtcggacctgtgcggagcgcgcgggaatatttcgtcactctcagcaatggctttgacagcatatttgtccatcacggctggagtcccggcgccaaaaagcagctggaatccggagctgccgattatatgaacggattggattttgacggaagcttattttggagagctgatttcagcaaaccgccccacaattcctatacgtcttatgattacataaaaaaggcggcagaacaaaagggttataagctgaagcaggaaacaaatccgctgctgtttcaaacatcagatgcaaaacctgcaaatgaatcttacaatgttcgggtagattatggaacaaaaaacgttacaaatcttgtcgaatacaactatgataaaaaagctgaatcttatacaagaagctctgatggtgtcataacgacagaccgggaaaccggaaagccggttgcaatgcaaaatattttcattgttgaagccagccatcatattattgatcaagatggaaggcgggacatcgacttggtatcaggaggaaaaggtctgttgtttcagcacggaaacgtcattgaaacagactggaaacaagtgaatggcagaattgtgccgataaaagacggcaagtggcttccgtttgtgccaggaaagacttggatcaatatcgtacctgatcttgatgcggcttccattagtaaaggagaaggtgtgtaacgatgcaaatcgataaattacgcggcaaagagctggaccagttatttaactcgatcttatcgctgaaagacctggaggaatgttaccgattcttcgatgatctatgcacaattaacgaaattcaatcgctggctcagcgccttgaagtggcgcgcatgcttcgcgaaggaaacacgtatcataagattgaaacagaaacaggcgcttccacggctacgatttcccgtgtgaaacgctgcttaaattacgggaatgacgcttatgaaatggcgcttgaccgtgtgaaggagacggaaactgagtcttcttcaaaataataaacaaccgccctgccgttcggcaagggcggtttctttatgaaacaaattgatggatcaggttgtcgatatcgatgatactgccatcctctttccgatagacaacatgctccttggaaaagtgaatcggcgaattgatccctgctgcggctgcaaggttaaatagtccctcgcgcaatgaaataacgtagttgcagacacgatgctgtttttcctcaacgctcagtgctttttgcaatttcggatctgtcgtcgccacacctgccggacatttgttggtgtggcagacgagagcgcggatgcagccaacggaaaacatcatgccgcgtgcgatgttgacaaagtcagcgccgagggctaaggcgaccgcgattttatcaggagtcaggagctttccggaagcaaagattttcagctggctgcgcaagccgtactgtttaagaagcgtgtcaacaataggcagcgctgtcataatcggaaggccgactgtatccgcgagctcgtaaaaggaagctccggtaccgccttcacttccatcgatcgtgataaaatccggatgttttccgcttttctgcatatgagagaaaagctcatgcaattcttcaggatgccctgcgaccagtttgatgccgactggcttttgtccgacatctctaagtttttcaataaagtcgagcatttcaggagggtttgagaattcataaaagcggttcgggctgtcaatcgactttccaggttcgacattccgaatgtctgccacttcctctgatactttggcgccatccacatggccgccccgggttttcgctccttgtgccagctttagctcaaacgctttaatctggtcaatcctgctttttcttttaaattcctcccacgaaaattccccgtttcttttgcgcacgccgaataggcccggtccgatttggcaaatgatatcggcgccgccctttaagtgatattcagacaatcccccttcacctgtattcatccaggtgccgcctgcctgatggagcccttttgagagcgccgtaacagcccgttctccaagagaaccgtagctcatggcagactggccgactaagcccttcacataaaatggcttctcgcatgtacgctcgccaatcacctgtacatcatcaggatggagaaaatacgggtctgccttgatatgttcggcatgctccttgcgtttgaacagattgtcagcatccattttatagatttgggtttcaattttgggcgtttgatttacgtgcatttcttccctttgttttggaaacatagcgttacggatataatagccaggtttatcaaaatctcttacagatccaaagcccatcattctgcttttgtatttgccggagatgacggtttgctcatattcctttcgtgaaaaaggctgctcctcattgtcattgctgtataaatactgtctgagctccggcccgattttttcaaggatataccgaaaccttccgatgacgggatagttgcgaagaattgagtgctcctgctgtttttcatcctttatgtagatccaggcaaacaagacgatcgggatagcgatgatccctatgataaatgcgatgagtgctattatgatggtttccatctctcagcctccctttttatgtaaccatttccacagttgaacactttccaaacaatagcagaaggaatctggtgaaaaatgtgtgcttctgccgatacaggactcagagagcaggtactgccatatgctctttttttatgaaaatagaatcaaaacacctttttcagtgaataacgagattaacggctttttccgtttttccgcgctatgtgaatttgttataatgtttaaatggtaacaaacgaatggaggaacgtatgacgtgtacgatgtaacggagtggaagcatgtctttaaactcgatccaaataaagatttgcctgacgaacagctggagattctttgcgaatcaggaacggatgcggtcattatcggaggcagtgatggtgtaacagaggataatgtcctgcggatgatgtctaaggtaagacggtttttggtgccgtgtgtccttgaggtatcagcgattgaagcgatcgttcccggctttgacttatattttattccgagtgtattaaacagcaaaaacgcggattggattgtcggaatgcaccagaaagccatgaaggaatacggagaactgatgtctatggaagaaatcgtggcggagggctactgcatcgcaaatccagattgcaaagccgcggcactgactgaagcggacgccgatctgaatatggatgatattgtcgcctatgcgcgtgtgtcggagctgctgcaactgccgattttttatttagaatacagcggcatgcttggagacatagaagctgtcaagaaaacgaaggctgtattggaaacgtcaaccttgttttatgggggcggcatcaaggatgcggaaacggccaagcagtacgcagagcatgcggacgtgatcgttgtaggcaatgctgtgtatgaagattttgacagggctttgaaaacagtagcggctgtgaaaggcgagtagtaaattgtacggatttggtttatgatagaacatatgttttgtataggcgggtgaacaaattttgaattatattagcaatcaattactaagcggtttaaaccccgttcagcaggaagcagtcaaaacaacggacgggcctcttttgctgatggcgggagcgggaagcggaaagacgcgtgtcctgacccatagaattgcttatttaatggcggaaaagcatgtggcgccgtggaacattctggcgatcacatttacaaataaagcggcacgcgaaatgaaagaacgtgtggaaagcatcctcggacccggcgcggacgatatctggatttccacattccacagcatgtgcgtgcggatcttgcgcagagatatcgaccggattgggatcaaccgaaatttctccatccttgatacggctgaccagctttcagtgatcaaggggattttgaaggagcgcaatcttgatccgaagaagtttgacccgagaagcatcctcggtacgatcagcagtgcgaaaaacgaattgaccgaaccggaggaattctctaaagttgctggcggctactacgatcaggtggtcagcgatgtatatgctgattatcagaagaagctattgaaaaaccagtcgctcgatttcgacgatttgattatgacgacgattaaactgtttgaccgagtgccggaagtacttgaattttatcagcgcaaattccaatacatccatgttgatgagtatcaggatacgaacagggcgcaatacatgcttgttaagcagcttgccgagcgtttccagaacctttgcgttgtgggggattctgatcagtcaatctacagatggcgcggcgcggatatcaccaacatcctttcatttgaaaaagattatccgaatgcaagcgtgattttgctagaacaaaactatcgttcaacgaaacggattttgcgcgcggcaaacgaggtcattaaaaacaactctaaccgcaaaccgaaaaatttgtggacggaaaacgatgaaggcatcaaaatttcctattatcgcggtgataatgaattcggagaaggacagtttgtggccggcaaaattcatcagcttcacagctcaggcaagcggaaactgtctgatatcgccatattataccggacaaacgcgcagtcccgtgtgattgaggaaacgcttctcaaagcgggcttgaactataacattgtcggcggcacaaagttctatgacagaaaagaaattaaagacattcttgcgtacctgcgcctcgtatccaatccggatgacgatatcagtttcacgcgcattgtcaatgtgccgaagcgcggagtcggcgcgacatcacttgaaaaaatcgcttcgtatgcggccataaacggcttgtcatttttccaagcgattcagcaggttgattttatcggcgtcagtgccaaagcggcaaacgcgcttgacagctttagacagatgattgaaaacctgaccaatatgcaggattacttatccattacagagctgacagaagaaattcttgataagacggaatacagagaaatgctgaaggctgagaaatcgatcgaagcccaaagccgtttagaaaatatcgacgagttcctgtctgttacgaaaaactttgaacagaaaagtgaagacaagacactcgttgcgttcctgacagacttggcgttgatcgcagatattgatcagctcgatcagcaggaggaagagtcaggcggcaaggatgcgatcaccctgatgacactgcacgccgcgaaaggactggagtttccggttgttttcttgatggggcttgaagaaggcgtcttcccgcatagccgttcactcatggaggaagcggaaatggaagaagaacgccgccttgcgtacgttgggattacaagggcggaacaggagctttatctgaccaatgctaaaatgcgcaccttgtttggccggacaaatatgaacccggaatctcgcttcattgctgaaataccggatgatttattggaaaacctaaatgagaaaaaagaaacgagagcgacgtctgcgagaaaaatgcagccgagacgcggccctgtttcacgcccggtatcctacgccagcaaaacaggcggcgacaccttaaactgggcagtcggagataaggcgggccataaaaaatggggaacaggaactgtcgtcagcgtgaaaggcgaaggagaagggacggagctcgatattgcctttccgagccctgtcggcgtgaaacgcctgttagcagcatttgctcctattgaaaagcagtaattgaagaggaaaggaagaagcagatggacaaagaaacagcgaagcagcgggcagaagaactgcgccgcaccatcaacaagtatagctatgaatattacaccttagatgaaccgagcgtcccagatgccgaatacgacagattgatgcaggagctgattgcgatcgaggaggagcacccagacctcagaacgcctgactctcctacgcagcgcgtcggcggagccgtgcttgaagcgtttcaaaaagtcacccacggcacaccgatgctcagtctgggcaacgcctttaatgctgatgatcttcgtgatttcgaccgccgtgtgcgccaagccgtcggcgacgatgtggcgtataatgtggagctgaaaatagacggtcttgctgtttctctccgttatgaagacggctattttgtcagaggggccacaagaggtgacggaacgactggagaggatattacggagaacctgaagacgatccgcaatatcccccttaaaatgaaccgtgagctgtcaatcgaagtgcgcggagaggcgtatatgccgaaacgttcgtttgaagcactcaatgaggaacggattaaaaatgaggaagaaccgttcgccaatccgcgaaatgccgcggcgggatctctcaggcagctcgatccgaaaattgcagcgaaacgaaacctcgatatcttcgtctacagtatagcggagcttgacgagatgggtgtggagacgcaaagccaagggcttgattttctcgacgaactcggatttaaaacgaatcaggaacgaaaaaaatgcggcagcatagaagaagtcatagtgctgatcgatgagtttcaggcgaagcgcgcagacctgccgtatgaaatagacggcattgtcattaaagtcgattctctcgatcagcaggaggagctcggttttacggcgaaaagcccgcgctgggccatcgcgtataagtttcctgctgaagaggtcgtgacgaagcttctcgatatcgaattaaatgtcggcagaacgggtgtgatcacgccgaccgcgattcttgagccggtaaaagttgccggcacaacggtctcaagagcatcccttcataacgaagatttaattaaagagaaggacattcggattttggataaggttgtcgtcaaaaaagcgggcgatatcatcccggaagttgtgaatgtcctcgttgaacagcgaacaggagaagaaaaggaattcagcatgccgacggaatgtcctgaatgcggcagtgagctcgtccggatcgaaggagaagtggcgcttcgctgcattaaccctgaatgtccggcgcaaatccgggaagggctgatccatttcgtttcccgcaatgccatgaacattgacgggctcggcgaacgagtgatcacacagctgtttgaggaaaaccttgtccgcaatgtggcagatttatataagctgacgaaggaacgagtcatccagctcgagcgcatgggtgaaaagtccactgaaaacctgatcagctccatccaaaaatcaaaagaaaattcgttagagcgtttgctgtttgggcttggtatccgttttatcggatcaaaggctgcaaagacgcttgccatgcattttgaaagcttggagaacctgaaaaaagcctcaaaagaggaacttctcgcggtagatgaaatcggtgaaaaaatggctgacgcggtcatcacctattttcataaagaagaaatgcttgaactcttgaatgaacttcaggagctgggcgtaaacacgctctacaaaggcccgaaaaaagtaaaagcagaggacagcgactcttactttgccggtaaaacaattgttctgacaggaaagctggaagagctgtcaagaaacgaagccaaagcgcaaatcgaagcgctgggcggaaagctgactggaagcgtcagcaaaaacacagacttagtcatcgccggagaagcggcgggaagcaagctgacaaaagcacaagagctgaacattgaagtgtggaatgaagaacagttaatgggagagctaaagaaataagaggagtgttttctattgaaaaagacgttggcattggcggcaacggcggcagtattaatgctgtctgcctgctcgtcaggttttgggggggagaaggaggaagagattacgcaaaagacggcgaaatcgtcagaaaaagcgattgtcccgaaatataatatctctgactcctattacaaaatggtgctgccgtttaaggcaggcaaagcgcgcggcttaacaacggaacagctgaacactaggctggacattgacgagtttgaaacagggctgatgcgtcttgcccaagattctttctcgactgacgattatctgttccaagaaggacaatatttagatgaggatacagtattaagctggctggcacggaaaaaaacgggctctgatttgaaaaaagccgaaaaagaagataaaaacttcaaaaatgaaggcttgaacccggcgctcccgagttctggttcaacagaagaaaagaacgaaagcagcccgatttatttagcatccatgcttgagcacgattatttagtcagaaaagacaagaattctatccagcttggcggcgtcatgatcggactggcgttaaactcagtgtattactatcgtgaaaaaactggcgacccgcaaaaagaagtggagattaaagacagcacgcttcgccagcagggagaaaaaattgcacaggaggttattaaccgcctccgcaaaaaagataacttgaagaatgtgccgattaccgtcgcgctctacaagcaggcgtcaaaaacatcgattgtgccggggaacttcatcgccaaaacagaggtcaaagcaggctctactgatatctcaaattgggatgacatcaatgaaaaatatgtattctatccggcagatacaaccacagcagaaaaatacccggatgacaccgaggtctttaagcggttcaaaaactcaattgaagaatatttcccgaactatacaggcgttgtcggtacagcgctgtatgaaaatgatgaaatgaagaaaatgaagattgacataccaatgcaattctacggaaaaagtgaagttgtcgcgtttacccagttcttaacgggtgaagtgatggactactactctaagagctcagttgatgtcgaagtcaatatcacgtcctcagacggacaggaagcggtcattatccgcaatgccggagataaagagccgactgttcacatttatgactgatagaaaacccttgtgccatattggcacaaggggttttatgttacaattaacaggaaaagggaaaatatttccgcttctgccgaaacacaaatcaaggggaggtatgttgatgctggaaatcgtgtgaaaacaatcattatcaaatctatagcaatgaaaggatgttagacatgcataaagatatcaaaaaaatatttgaggaagagcaggttttggcagaagctgcagcgagatacggtttctcaaaagatcaggtgcgttttctggctgatgcggaaaactatgtatatgaatgtatgaaagacaatcaaccttatattttaaagattacccatacgattcggagatcttctgattatataatgggagagatggaatggctccgtcaccttgcaataggaggaatttcagtagccaaaccgctcccgtcgctgaacggaaaagatgtagaagcagtgccggacggaaacggcgggtcatttttattgagagtgtatgagaaagcgccggggcaaaaagtggatgaatcggactggaatgaaacgctattttatgagcttggcagatacacaggcagcatgcacagcttgacaaaaagctacaaattgagcaatcccgctttcaaaagacaggaatgggatgaagaggagcaattaaagctgagaaaatatgtacctgaagatcagataaaggtgtttcagcaagccgattatttgatgaatgaactgcggaggctcccgaaaagccaggacagctacggcttggtgcatgcggatctgcaccatggcaattttaactgggatcatggcaaaatcacggcatttgattttgatgatatcggctacaactggtttgttaacgatattagcattcttctctacaatgtcctgtggtatcctgttgtgccatatgatgataaagctgcgtttacagaagaatttatgacgcattttatgaaagggtactgggaggaaaatgagcttgaccctacatggctgatgataatacctgatttcctccgccttcgccatatgctgatttacggattgctgcatcagatgtttgaccttaacacaataggagaagaggaaaaagaaatgctggccggtttcagaagagatatagagaatggcacgccgattacagcatttgatttttcagcactggtgtagatagaaaaagccaatgggattccagtcccattggcttttataatgtatcacacttcacgccgactacgccttcaatggctttaatgtcatagtagacatcggtcgtgtatctgtttttatggacgcggaccttcacttccataattggaaaatccttttcgcctaggtcgtcgatccgaacggagtgtgctttgatatctcttcttttcatttcttttaaaatctctgtcattttgtctttatcagaaagtgacattctgatgcggatgtctttttcctgcaggcggtcggggccgatttttctgaccacccatgggagaaattccacgctgatcaggatgaacagaagactggcaaacgcttctttataaaaaccggctcccgtagccagcccgagccccgctgccccccagatcatggccgatgtcgtcaggccggaaatgacatcattgctttttcgcaggatgacaccggctccgataaacccgacgccggagatgatttgtgccggcagacgaagcggatccatcatgatgcggtagtatttagggaaatgatatgccgcattaatactgacgatcgtcagcatgcatgagctgactgcgatgacgatacaggtttttaatccgagcggcttattttttaattcgcgttcaagcccgatgaccatgccaatcaatgtggcaatgcccaatttcaataaaatatcaggatcaatataccagctcaacagcaacttcccccttctctaaggtgtttttaaataaatatgattttctcacagtatttatagcaaaacaagggtacaaaagccaccaagctgcgcttgatggcttattgcttactttttgcgttttaacagcttttccatgacaccgaataatcggtaagaggcttttgcaggacgttttgtgatcatgctgacaatgatgccggcaatcatactgagaataaacccagggatgatttcgtacacaccggttgattttgccaggccggttgtaatccagatcaacacggtcgcagccccgacaatcatggcagcaagcgcgccccattcgttcattcgcttccaatacagactgagcagaatcgcaggtccgaaagctgaaccgaagccggcccaagcgtatccgaccaaatcaagaatggtgctgttcgggttcaatgacaagagtaccgcgataacggcaatgactaagacggacaatcgcccgatcatgaccaattctttatcagaagcttttcgtctgaaaaatgaccggtataaatcctctgttacagcacttgctgtgactaagagctgtgaggaaatcgaactcatgatggcagccaaaatagctgacaataagaaccctgtaattaatgggtggaacaagattttagagaagataatgaaaatcatctccggatcttttacagcaactccgaatttatgggcgtatgcaacaccgattaaacccgtcagcacggaacctagaactgtaatgatcatccagctcataccgattcggcgtgcaggttttaaatctttaatgtctttaatggccataaatcggacgatgatatgaggctggccgtagtagcccaacccccaggctaaataggaaataatgctaatgacgctcgcgcctttaaaaatatccaataagtgtgggttaacagcgtcgatttcatggaaagtcggagcaacgccgcccacatgggtaaaagcaacgatcggcacaagcactagtgctgcaaacatgatcgcaccctgcacgaagtcagtcagactgacagcaaggaaaccgccaaacagtgtgtataatacgacaactgcggtggtcagaaacaagcctaatttgtaatccgcaccaaaagcagattcaaacagccgtccgccagataccataccggaagaggtatacaatgtgaaaaagatcatgatgatcaatgcagatacgattttcagcagtgatgaagaatgctggaatcgtttatcaaagaaatcaggaatcgtaatcgcatcatccgccgcttctgtataagcacgcagccttggagccagcagcaagtaatttgagtacgccccgattgtaagacctaaagcaagccataaggtggacagccctgtcgcaaacatcgcgccgggaacacccatcagcatccatccgctcatatcggccgcgccggcagacaaagcagtaacgaatggtccgaggcctcttcctccaagcatgtaatcattgatgtcagtggttttcttgaatgcataccagccgattaacagcatggcaataaagtaaattcctaaagatataataatttcaatactcacgttttaccctctcttcatttctaataatgttgcatcacctctcaaattgatggtgccagttaagcagcctggcgtaagtgcaaaacaaaagaaattcctttgcgggtgcacttggtaacttaacctaacaaagtattcccggccattcaagcgatgaaaccttgatcatgagcggggaaaaccgttgcaaacctagaagggaataaagaataaaacgctttcaagaaataattaaagtaaaaatattcagaaaaatatttcgtttctccttctcctcattttagtataaaatatatagggtattgtttcgaaaacacaggcctgtctcaaggcgttttgttgctttaaagggcttgtttttgatatgatcagtattatatgacttaacggagaaatatgtggaggtggatcatatgtcacgaatttcaatagaagaagtaaagcacgttgcgcaccttgcaagacttgcaattactgaagaagaagcaaaaatgttcactgaacagctcgacagtatcatttcatttgccgaggagcttaatgaggttaacacagacaatgtggagcctacaactcacgtgctgaaaatgaaaaatgtcatgagagaagatgaagcgggtaaaggtcttccggttgaggatgtcatgaaaaatgcgcctgaccataaagacggctatattcgtgtgccatcaattctggactaaaggagggacacaagaatgtcattatttgatcataaaatcacagaattaaaacagctcatacataaaaaagagattaagatttctgatctggttgacgaatcttataaacgcatccaagcggttgatgataaggtacaagcctttttggcattagatgaagaaagagcgcgcgcatacgcgaaggagcttgatgaggcggttgacgggcgttctgagcacggtcttcttttcggtatgccgatcggcgtaaaagataatatcgtaacaaaagggctgcgcacaacatgctccagcaaaattctcgaaaactttgatccgatctatgacgctactgtcgttcagcgccttcaagacgctgaagcggtcacaatcggaaaactgaacatggacgaattcgccatgggatcatctaccgaaaactcagcttacaagctgacgaaaaacccttggaacttagaaacagttcccggcggttcaagcggcggatctgcggctgcggttgctgcgggagaagttccgttttctcttggatctgacacaggcggctccatccgtcagccggcatctttctgcggcgttgtcggattaaaacctacatacggacgtgtatctcgttacggtctggtcgcatttgcgtcttcattagaccaaatcgggccgattacacgtacggttgaggataacgcgtttttacttcaagcgatttccggcgtagacaaaatggactccacgagtgcaaatgtggacgtgcctgattttctttcttcattaactggcgacatcaaaggactgaaaatcgccgttccgaaagaataccttggtgaaggtgtcggcaaagaagcgagagaatctgtcctggcagcgctgaaagtccttgaaggtctcggcgctacatgggaagaagtgtctcttccgcacagtaaatacgcgcttgcgacatattacctgctgtcatcttctgaagcgtcagcgaaccttgcacgctttgacggcatccgttacggctaccgcacagacaacgcggataacctgatcgacctttacaagcaaacgcgcgctgaaggtttcggaaatgaagtcaaacgccgcatcatgctcggaacgtttgctttaagctcaggctactacgatgcgtactacaaaaaagcgcaaaaagtgcgtacgttgattaagaaggatttcgaggacgtatttgaaaaatatgatgttattgttggaccgactacaccgacacctgcgtttaaaatcggtgaaaacacgaaggatccgctcacaatgtacgcaaacgatatcttaacgattccggtcaaccttgccggcgtaccgggaatcagcgtgccatgcggattagcagacggacttccgctcggcctgcaaatcatcggaaaacactttgatgaaagcactgtataccgcgttgctcatgcatttgaacaagcgacagaccatcataaagcaaaacctgaactgtaaggggtgaaaagaattgaactttgaaacggtaatcggacttgaagtccacgttgagttaaaaacaaaatcaaaaattttctcaagctctccaacgccattcggcgcggaggcgaatacgcagacaagcgttattgacctcggatatccgggcgtcctgcctgttctgaacaaagaagccgttgaattcgcaatgaaagccgctatggcgctcaactgtgagatcgcaacggatacgaagtttgaccgcaaaaactatttctatcctgacaacccgaaagcgtatcagatttctcaatttgataagccaatcggcgaaaacggctggatcgaaattgaagtcggcggaaaaacaaaacgcatcggcatcacgcgccttcaccttgaagaagatgccggaaaactgacacacacaggcgacggctattctcttgttgacttcaaccgccaaggaacgccgcttgttgagatcgtatcagagccggatatccgcacgccggaagaagcgtacgcgtatcttgaaaagctgaaatccatcatccagtatacaggcgtttctgactgtaaaatggaagaaggctcacttcgctgtgacgccaatatctctcttcgtccgatcggccaagaggaattcggcacaaaaacagaattaaaaaacttgaactcctttgcgtttgttcaaaaaggccttgagcatgaagaaaaacgccaggagcaggttcttctttccggcggcgtcatccagcaagaaactcgccgttatgatgaagcaacgaagaaaaccattcttatgcgtgtcaaagagggatctgacgactaccgttacttcccagagccggatctagtcgagctctacattgatgatgaatggaaggaacgcgtaaaagcaagcattcctgagcttccggatgagcgccgcaagcgttatatcgaagagcttggcttgcctgcatatgacgcgatggttctgacgctgacaaaagaaatggctgatttcttcgaagaaaccgttcaaaaaggcgctgaagccaaacaagcgtctaactggctgatgggtgaagtgtcagcttacctaaacgctgagcaaaaagagcttgccgatgttgccctgacacctgaaggccttgccggcatgatcaaattgattgaaaaaggaaccatttcttctaagatcgcgaagaaagtgtttaaagaattgattgaaaaaggcggcgacgctgagaagattgtgaaagagaaaggccttgttcagatttctgacgaaggcgtgcttctgaagcttgtcactgaggcgcttgacaacaatcctcaatcaatcgaagactttaaaaacggaaaagaccgcgcgatcggcttcctagtcggacagattatgaaagcgtccaaaggacaagccaacccgccgatggtcaacaaaattctgcttgaagaaattaaaaaacgctaataaaaaagcagcccttagaggctgctttttttatggtcaaattgagataaagacagagatgagggcccgaagcctttcaacttctttgtcgttggttccggtcaaattggacagcatgcctttaataatcggcttgcgcggtttatcctgagtcaattcttcctcgataacatcaagtgacacggtgatatcctcgggcagcgtgctgttttctttcactttctgaatgtcctcaagcagctggtcttttcccgcaggcatcgggttgaaaatgtcttttgatacaatcggattgagtgcagaacggctcagcccctgtacaagatcattcagtctctcaataataaaggctgagatttcttctgcatcgatattaagctcaccgttaaataccatcacgttcatataggaatgcacaatgcctcttgccatgatggacagatctgcgacataccgctcgattccttcgccataggataccagcaaggcgttccggtacagcttatccgtctccatggttactttgtaaaagtattgcttgatttcttgattttccggaatgatattttcggtaagcaaaagaacgataaaatctttatgatcgcgaaaatcctcaaattgagcgccaatttgcttttttaacacttccttagggggctttccggcgagatcttcttctatatttttcattttgttcatagacataccgatataatattcacaggcagataacagcagcgcttctttcgatttgaagtgcaaataaaaagcgcccttcgaaatgccgcattcactggcgatttcttggatcgtcgtagctgcgaatccttttttcgcaaataaacgaatgctggtttttatgattctctcttttttttcattcatgacgtgcttccccttaatccttgaaaaatttagtaaaattttctggtatatgagttgacgttgttgcgttataacgtttagtattatatagaatgaccagtcagtcaataaaaaatgtaatggaggatatgatgaaccacgttattaatttcgttctgaaaaacaaattcgccgtatggctgatgacgattattgtaacggcagccggcttgtatgcgggtatgaatatgaagcaagagtctattcctgacgtgaacatgccttacttgacgatcagcacgacatatccgggtgcaacaccaagccaagtggctgatgaagtgaccaaaccggttgaacaagccgtacagaacttggacggtgtcagcgttgtgacgtcgacgtcctatgaaaacgcatcgtcggtcatgattgaatatgattatgagaaagatatggacaaagcgaaaacagaagcagctgaagcgttagaaaacgtcaacctgcctgatgacgcgaaggatccggagatttcacgctacagcttgaactcattcccgattctgacgctgagcgtgtccagtgataaagataatctacaagagctgacgaaacaagtggaggacagcctcgtttctaaacttgaaggcatagaaggcgttgcgtccgtccaagtatcaggccagcaggtggaagaggttgaattctctttcaaagaagacaaactgaaggaatacggccttgatgaagatacagtcaagcaagtgattcaaggttcagatgtgacaactccgcttggattgtacacattcggaaatgaagaaaaatctgtcgtcgtcagcggcgatattgaaacaattaaagatttgaagaatatgagaatcccgacggtatctgcttcaagtgcaggcagcagcgcagcatctcaagcgggtgcgcagagtgctcaagcagcccaaagcgcacaagcggcagcacaggcgcagcaaagcgcaagcacagcagtgccgacagtcaagctttctgacattgctacaattaaagatgtgaaaaaagctgaatctgtttcacgcacaaatggcaaagacagcatcggcatcaatatcgtcaaagcaaacgatgcgaatacggtagaggttgccgacaatgtcaaagctgagctgaagaagttcaaagaagaccataaaggcttcaattacagcgcaactctcgacatggcggagccgatcacacagtcagttgacacgatgttaagcaaagccatcttcggtgctatttttgcgattgtgattattctcttattcttaagagatatcaaatcaacattaatttctgttgtttcaattccattatcattgctgatcgcactccttgtgctgcagcagcttgatatcacattgaatattatgacgctcggcgcaatgaccgttgccatcggacgtgtagtcgatgactccatcgttgtgatcgagaacatttaccgccgcatgagactcaaagatgagccgctccgcggaaaagccttggttcgtgaagcgacgaaggaaatgtttaaaccgatcatgtcatcgacgattgtgacaattgcggtattcctgccgctcgcacttgtaggcggacaaatcggtgagttgtttattccgtttgccttaacgattgtttttgcgcttgccgcatccctggtgatttcgatcacgcttgtgccgatgctcgcacacagcctgttcaaaaaatcattaaccggtgcgccgattaaagcgaaagaacacaaaccaggcagacttgcaaacatctataaaaaagtattgaactgggcgcttagccacaaatggatcacgtctatcatcgctgttctgatgctccttggaagcttgttcctcgtaccgttaatcggtgccagctacctgccgtctgaggaagaaaaaacgatgcagctcacatacagcccagaaccgggtgaaacgaaaaaagaagccgaaaatgaagctgaaaaagcggaaaaaatcctgcttgaccgcaagcatgtcgatacggttcagtattcattaggctctggcagcccgcttgccggaggagattctaacggtgcgttattctatatcaaatatgaaagcgacacacctgactttgataaagaaaaagataacgttctgaaggaaatccaaaagcaatctgaccgcggagaatggaagtcacaggacttcagctcttcaggcaataacaacgaattaacatactatgtgtatggcgattctgaaaacgatattaaagacacggtcaaagatattgaaaaaatcatgaaggatgaaaaggatctgaaaaacgtaaattcaggcctttccagcacatatgatgagtacacatttgtcgctgaccaagaaaaactaagcaaactcggtttaaccgcgtctcaaatttctcaggccttaatgtcacaaacatcgcaagaaccgcttaccaccgtgaaaaaagacggcaaagagcttgatgtgaacattaagacagaaaaagacgagtataagagtgtgaaagatttagagaataaaaagatcacttccgcgactggccaggaagtcaaaatcggcgatgtggcaaaagtgaaggaaggatcaacatcagataccgtgtcaaaacgtgatggaaaagtctatgcggatgtcacaggtgaggttacatctgacaacgtcacagccgtatcaactgctatccagaagaaaatcgataagcttgaccatcctgataacgtatcgattgacacaggcggcgtatcagcggatatcgctgattccttcacgaagctcggtttagcgatgctggcagcaatagcgatcgtttaccttgtgctcgtgattaccttcggcggagcactagcgccatttgcgattctgttctcattgccgttcacagtcatcggtgccctggtcggactttacgtatcaggtgaaacgatcagtctgaacgccatgatcggtatgctcatgctgatcggtatcgttgtcacgaatgccattgtcttaattgaccgcgtgattcataaggaagcggaaggcctgtctacgagagaagcgctcctggaagccggctctacacgactccgtccgatcctgatgacagccattgcgacaatcggcgccttgattccattagccctcggcttcgaaggcggaagccaggtcatttcaaaaggactcggcgtcacggttatcggcggtttaatcagttcaacgcttctgacgctcttgatcgtgccaatcgtatatgaagtattggcgaagttccgcaagaaaaaaccgggaacggaagaagagtaaaaaaacaaaaagcctcagctatgctggggctttcagcttgttgaaaaaccctcgcattcgttgtcaggtctgcgcgtcggtgctcacgaattctacattcactccgctccaatgctcccccttcctagactacaagggttttcaatcaagctgaaagaatgttaaggatgacaaaagctcaaaacaagaatcagttttgagcttttgtgcgttttcacctgtaagattatgtacattttgttgcgatttttttaactcatagtataattaaaggttgttagtgtaaaaatggatcggatactcttaagtaggatgatgagataatgaaacgtgcacgcataatatacaatccgacttcaggacgggagatctttaaaaagcatcttgcccaggtcctgcaaaaatttgaacaagccggctatgaaacctccacccatgcgacgacatgcgcaggagacgctacacacgctgccaaggaagcggcattgcgtgagtttgacctgatcattgcggcaggcggagacggaacgatcaacgaggtcgtcaacgggcttgcgcctttagacaaccgtccgacactcggtgtgattcctgtcggcacaacgaacgacttcgccagagcgctcggcattccgcgcgaggatattttaaaagcagcagatacggtcattaacggcgttgcccgcccgattgacatcggacaggtcaacggccagtattttatcaatatcgccggaggaggccgcctgacggagctgacgtacgacgtgccaagcaaactcaaaacaatgctcggccagcttgcttattatttaaaaggaatggaaatgctgccttcacttcgtccgacagaagtcgagattgaatatgacggcaagctgtttcaaggtgaaatcatgctgtttttggtcacgctgacaaactccgtcggcgggttcgaaaagctcgcgccggattccagcctgaatgacggcatgtttgatttgatgatactaaagaaagcaaaccttgctgaatttatcagggtcgccacgatggcgcttcgcggcgaacacatcaacgaccagcacattatttatacaaaagcgaaccgcgtgaaagtcaatgtatcagaaaagatgcagctgaacctggacggcgagtacggcggcatgctgccgggcgaattcgtgaatctgtaccggcacattcacgtcgtcatgccgaaggagaaagcggaacagctggatgactaaaacttggctttgtaagccaagctcagaatgttgacaaaatcctaaaacagttttcgttttaggattttgtcatcttttcagcgtgattgaaaacctttgaagtctaggaagggcgagcatcggagcacagcgaatgttgaattcgtgagcaccgaagcacaggactgacaacgaatgcgaaggtttgcctacacgctgaaacttggcttgaataggccaagtttttctttcgcttaaaacaagaggtgaacatacatgaaaatgaaacccccagtagaaaaaaacgaatactatgacgtgacatttgaggatttgacccacgaaggagcgggtgtcgcaaaggtccaaggattcccgatctttgtgccgaacgccctgccggaggaaaaagcccaaatcaaagtcacacgtgtcaaaaaagggttcgccttcggccgtctgattgagctgaaggaagaaagcccgcatagaacggatgccccatgcccgatttacaagcaatgcggaggctgtcagcttcagcacatgacctacgaaggccagctcttgtttaaacagaaacaagtcaaagacgtcttagaacgcatcggcaagctggacctttcaaacgtcaccgtgcacccgacactcggcatggaagacccgtggaactacagaaacaaagcacaggtgccggtaggagaacgggaaggcggactcgtcgcgggattctatcagcaaagaagccatgacatcatcgacatgagcgcctgcctgatccagcaatccaaaaacgacgaagccgttcaagctgtcaaagacatttgcgcaaactacggtgtcaaagcctacaacgaagaacgccacaaaggctggctccgccacatcatggtcagatacggcgttgttacgggcgaaatgatgatcgtcttcatcacaagaacaagcgacttcccgcacaaagcgaagatcatcgaagacatcacagcgcaattcccgcacgtcaaatccatcgtgcaaaacatcaacccaaacaaaacaaacgtcatttttggcaacgaaacaaacgtcatctggggcgaagaatacatctacgacctcattggagacgtcaaattcgccatctccgccagatcgttctatcaggtcaatccggagcaaaccaaagtgctctacgacaaagcgcttgagtacgctgagcttcaaggggaagaaaccgtcatcgacgcctactgcggcatcggaacgatttctttatttctggcaaagcaagcgaaaaaagtgtacggcgtagaaattgtaccggaagcaattgaggatgccaaacgaaacgccgagctcaacggcatcacaaacgctgagttcgcggtcggggaagcggaaactgtgattccaaaatggtatgaagaaggcattacagctgatacgctagtcgtcgacccaccaagaaaaggctgcgacgaagccctcctgcggacgattgtggagatgaaaccgaagcgggtggtgtatgtgtcctgtaatcctggcacgcttgcgagagacctgcgggtggttgaggatggcgggtatcagacgctcgaagtgcagcctgtggatatgtttccgcatacgaatcatgtggagtgttgcgtgttgcttgaaaaaaacatgtgtgagttcgagaaattatagtatatctcggacttccgtcttctttaattcttcgatacactcaattggtttgtgaagaattttttcatcaatagttgggtttgagtgaattgttcaagttgttttagtaaatcatttaaattatctttaagtcggattaaggtctctaatcggagtctctacgcgattttgttttcagataggtatttgtttcaattggataggcttaacaaacaaatttgaaaaaagatcaataagcaacaagtcgaattaccagtcttacagatgtttaatacaatcgaaattgtcccctttgattatcaagggaagttagaggataacatagcagatgctattatgaccattaaaggagcaaataaatcttactttgatgtttgttgattttctttaacgctcattgttctaaagcaaatcttgacaaacggcaaattgtttttggtgttggtcaagatttggattgtctattgtttagaagacaccaataaaaactgcttttaaaaataattaagattgacaaatgaacgacgtagacagctttatgagcaaataaaccaattgtaaaggaaaaaaatcaaatataatcatattgttttcaatgaaaatgaaattacatttactattcccgatatcatagatgtaatcaataggatacaggctgtcataactcaattaaagcaagtgttaataaccgttgatccattggtaagtgaatatgccgaaacttgtgtaaggaagctctctaattagggggctttttgctttaaaaagaatagacatgtatcaattgacaaggaaaaggaaaaagttatatactgtatttaacaaatgttaaatcttctatttaacatagaaataggaggtgtaaaatgcaactcggcgatattgctaatgtaaagacagggcttgtgttaagtaggaaaaaggcagaagttgaatatgatgcgaaagctacatacaagctactttcactcaaaaatattgcggaagatggcatgattgaaaacgattcgtttgaggagtttgtaagtaatgacgatttagacgatcactactttacaaaagaaggtgatgtgctaatgcggttgagccacccacacacagcggttttcattgaaaaacaatatgaagggttgttaattccatcgtatttcgccatcattaaagtagacaaaacaaggttcctacgagagtacattgcatggtatctaaactcatttgaagtaaaaaaagagttggaacgctctcagtcaggtagtcgtatccccagtaccaatcaaaatgtaattaaaacactccctgttgtctggacaactctatcaaagcaaaaagcattaatcgaactttacaagctccatcaaaaagaaaaaatgctttataagagattaattgaggaaaaagacttattattccaagcgatttcacaacaaattttaaaggattcaaaatcggagggaaatattaatgattgaactaacaacacaagacaaaattaacagtgttttatggcaggccgcagatacttttagagggaaaattgattcctcaacatataaagattatattctaacaatgctatttataaagtatttaagtgatacatacaaggagcatttggaagaatatacgaagaaatataatggtgatgaacgacgcattgaacgtgctttatcaagagaacgttttgtacttgatgaacaatctacttttgattatttgtatagcaaaagaaatgatcctaaaattggagaaatcattaacaaagcattggaacgcattgaaaatgaaaacacaggtaaacttcgtggtgtatttcgtaacattgactttaacagtgaatcaatccttgggcaagcgaaagagcgaaatgcaatgttacgatcacttttggaggattttagacatttatctctaagaccatcacagttaggaaatgaagatatagtagggaatgcataccagtacatgattggactttttgcatcggatgcaggtaaaaagggtggcgagttctatacacccgctgaagtatcagaattactggcacgtttagttaaaccgcaagaaaacgaccgtatttatgatccaacatgcggatcaggttcgttgttaataaaagtggctaaacaggttccaagtagaaaagttgctatatacggtcaggaacgtaatggtgcaactcattcattagctcttatgaacatgtacctacatggggttgacgatgctaagattgagtggggcgatacattagcaaatcccttacatttagaggatggaaagttgatgaagttccaagcaatcgttgctaatcctccattttcattagataagtgggctatgggcttcgcaggagaaggaacaaatgacaaaaaatttaaaatggagtcaagttttgatccctatagacgttttgagtggggagtacctccaagttcaaaaggagactatgcatttgttcaacatatgctttattcattagctgaaaatggacgtatggctactattcttccacatggcgtactgttccgaggggcaagtgaagggaaaatacgtcaacaaattattgagatgaacttattggatgcggttattggtttaccagaaggattattttttggaacaagtattcctgcgtgtatcatggtatttaaaaaagaccgaaaacgaaatgatgttctttttattgatgcatctactgaagaacattttgaaaaaggaaaaaatcaaaattaccttcgagaaaaggatattgagagaattgttaggacatatgagaatcgggaaacaattgaaagatactcttatttggcaacaatagatgaaataaaagaaagtgaatttaatctaaatattccaagatatgtggacacttacgaagaagaggaacctgtcgatatgattacagtgaaaaataatatttcgaatataaagaaggaactacaagaagtagagttacaaatggagaagtatttgaaagagcttggattgtaggtgaatatacttgactaaaaataattatgttagaacggcgattggagaattaccttcagattgggaagtagaacttcttgataatatagcagaaagaaaatctggtcatacaccagataagaagatagaagagtattggaacggaaatattccctggatttcattgaaagacttatcacgattaaataaagggtttgtatatgaaacaacggattttacaacaaatgaagggattaagaactcttctgctgttttgttacctcaggggacaatagtcatttcaagggatgctacagttggaaaggttggaattcttgctgaggagatggctacgagtcaacattttatcaattatatttgtggggatagactgaataacgtttatctatactaccatttactatttagaaaccacattttcgaaaggattgctacaggaagcacaattaaaacaattggtttaagtttctttaaaaaactaaaggtagcactacctccaattagggaacaagaaagaattgcttctatcctttctgcttgggacaatacaattgatttaaaagaaaaactaattgattataaaaatgagcagaaacaaggattaatgcaaagattattgacaggagaagtaagattgccagggtttaagggggaatggaaaaaggaaaggattggtaaactcataactgaaagtaaagaaatagcaagtaaaccagatcttaataaaagaataaccgttagacttaatttaaaaggtattcagaaaagagatgtttcatctacagaaaaggaagatgctacaactcaataccttagaaagtcaggacaatttatttacggaaagcaaaatcttcataagggagcttttggcataattcctaaagcgttagaaggttatcaatcttcttcagatattcctgcattcaattttaatgaggaagttgatccttattggtttttttactatttttcaagggagagcttttatacaaacttggagaaaatatcaactggtacaggatcgaaaagaattaacccaaaagatttgtttaaggttaaaatccattttccaccttatacagaacaacaaaaactttcagaagtctttttatgttttgatagagagattagtctacttaaagaagaggtcgaagcattaaaagaacagaaaaaaggtcttatgcaattacttttaacggggaaagtcagagtaagggtataaatcatttactttatttcttcgtttttattaggaggtgtagagatggcaagggagaagagttatgatgaacgttacataagccaagttcctgcaattgaggttcttcgaaggttaggttatcaatatcttgaaccagaagaagccgagcagatgcgtgggaatttgtacaacgtattacttagaaatgttttgcaagaaaagttacggtcatttaattcttatgaatacaaaggggaaatatataagtttagtgactccaatatccaacaagctattcgagatttagatgaaccattaacaaatggtcttgtaaagacaaatgaagcgatttatgaaacgttaatgaaaggaagaacatattctgagtttttacctgatggctcaaaaaagtcatttacaattcaatttattgattggaagaacattgaaaataatgtgtttcatatagtggaagagtttaatgtggaacggatggatggacgtggaaacgttcggcctgatattttactgtttgtaaatggtattccttttgttgtaattgaatgtaagaaagcatccatctcgatggaacaagggataagtcaaatgattcgaaatcagggtaaggattatgttcctcaactgtttaagtttgtacaaatggttatgtctactaacaaaaatgaaactaagtatgcaacatgtaatacaccaaaaaagttttggtctgtatggaaggaagaaaaagaagtatggttagagtcttggttggacaaagctgtagaaagtagattgccaacaacacaggataagaatattatttctctgtttcatcctaagcgtttattagagatcactcaatttttcactctgttcgataaagacgtcaaaaaagtagctcgttatcaacaatattttgctataaaagaaatcattaaaacaattcaagaaagagatgaacatgggaatcgtcaaagtggtgtgatttggcatacacaaggatcaggaaaatcactaacgatggtgatgttagccaaatacattctttctgagttgtttgaatataatccgaaagttgttgttgttacagatcgggttgaattggataaacagattcataagacgttccgtcatacaagattaaaggcaagtagagcaacatcgggcggccatttaattgatctaatcaatgacaacaatgctgatattgtcacaacgttggttcataagttcgatacagcatcttcaaaacaaaaaccaattgagtcaaaggacatttttgttttagtagatgaatctcaccgaacacaatacggagagcttaatataaaaatgaaaaaggttttccctaatgcatgctacttaggttttacaggcacgccgttaatgaaaaaagaaaaaaatacgatgattaaatttggaaagctaattcacacatatacaattgcagatggtgtacgggataaggctattgtcccgttattatatgaaggaaaaatggttgatcaatcggttaatcaaaaggctattgataacagattagagatgattactcgtaatctaaatgacaagcaaaaggaagaagtaatgaaaaagtggagccaatttgaacgaattgcttcctccaaccaaagaataagtatggttgcatttgacataaatgaacatttttttaagaattacaaaacacaaggaagcaactttaaagcgatgttagctacaaatagcaagattgaggctattcgttactttgaatcatttgaagaacttggcgatttgaattgtgctgtagttatttctccacctgaccaacgtgagggacatgaagtggtcgatgtggaatcaaaggacaaagtacagcatttttggaaaagaatgatggatcgttatggaacacctgaagactatgaggatgccataaaagatgaatttattaatggtgatgaaattgacttactcattgtcgttgataaattgctcacaggttttgatgctccgagagctacagtgttgtatgttgataagccaatgaaagaacacactcttctacaagcgatagcgagggtaaaccgtctatatgaaggaaaggattatggctttatagtagattatagagggttattagataaacttgatcaagcaatgcaaatgtactcaggagcagggttagaaaactttgatcctaaggatttagagggagctatacatgatgtcattagtgtaattggttcgttaagacaatttcattctgatttattacaaatatttgctcctattaagaataaacaagatgttgaagagtatgaagtatggttagaagatgaagaacttcgagagagattttatgatgtattaagcaactttgggcggaatcttggtattgcattagaatctgaaaaaattcacaatgctctacggccagaggaacttcaaaagtataagaaagacttgaagtttttccaagagctaagaaaaagtgtgaagctccgctattccgacacaattgatcataaggaatacgaggcaaaaatgcaaaagctaatggataattacatttctgccgaagagattatccgtattacaaatcctgtagatattttaaatgaaaaagcattcgaggaagaattagaacgcctggattcaaaacgtgctaaagctgatgccattcgtactcgtttaacgaaaagtgtaagtgcaaaatgggatgaaaaccctgcattttataaaaagttctctgaacgtattcaagaagctattaaagaatacaaggataaacgaatctccgaagcagagtatctgaatcgaataaaggatataatgaaagattatcgcaaaggtgaatcaaatgacgattatccagaagtgattaaggaaaatcgaaaagcacaagcgttttatggagttgcaaaagaccttatgagcgaagttgcggagatttctgaaagttatggttcggatacactcggagatttagctttaaaaacggataaagtgattaaagaacaccaaaaggttgactggcataataatcttgaaattcacaatcgaattgcacaggacttagatgatcttctctttgattttgcagaagaaaatgggatagaaatagattatgatacaattgataaacttatagagcaaattaaaaccgttgctcttagacgttattaaggttgtgaacagcatggagagacatcaaatccagtacgtaaataaaataattgactttgctattcaacgaaagaatgttaagaatgttaatcttaacattaagcctgatatgacaatagaggtgtctgcacatgatgccgttccgttgaatttcatttatgattttgtgaaaagcaaaggtgcatggattgttaagaatgtaaaaaactttgaaaatgcacaaccaaatagccaaagtgggcgagagtatgtaagtggtgaatcctttaagtaccttggaaaacaatatcgtctacgagtgcaaaatactgaggaagaggaaatagtaaaatacttccgaggatttatctatttattcgttaaagatcccaatgattacgaccgcaaagctaaacttatggatgaatggtatcgtgagaaagcatttatgacatttcaggaatctcttaataagcaacttccattagtacaaaagtacggagttgataaacctaatcttgatttacgtacaatgaaagctcgttggggttccgctttaaccgacaagaatacgattttattaaatacagagctgataaaagcgccaaaattttgtatagattatgtaactttacatgagttaatccattttaagtacaatgaccatagtgaaagattttatgatatgctgtactcattaatgcccgattgggaaaagagaaaagcaattttagatgaagagattgtaaaagacttataagaaaaagaacctctttggcaacttaacaaccagattaatcaacaaaaggcagttcctaattttcatgtggagactgcctttttaatttcttattcggattttattggagaattggtctacaaaattgaggattaattgagaggtgaggtcttggacgaaaatatgtgggaattgtcgttcgcaagtggcaacaaactgcttcacacttcatctgaaatacggtgattcttcataacaggattagatgaacgaggattcgcttgtccaatgtgagtcatcattatctttcattctttcaactaaagacgcgataatagagaaatttttcctaataaaggctatctcgtcactttctgataaaggattttcaataatgaggttatcatcttttacaaatttgcaatctttgctaaccgcttgatgtacacgtaatggttttgcaacacgctgtaggtcgttctcttcttttgggagaagatcatttacaatttggacatgctgtttgctacttatggcagtgaactgtctttgttcatgggtataactctttaaaaaataatgtttattatagtttgataacatgaaattattctcattcggaggaggttttttattggataatacgtataatccttttgataagatgcagtttacatataacaattgtttcctttgtgggagtaaagatgtttcgcaaaaaactttagagcatgtattcccaaagtggttgttaaaaaggtttgagttatggaataagcaaatacaattattaaatggtacattaatttcatataggcaattgaccattccttgttgtaacaaatgtaacaacgaatatttatcacgtattgaaaacaaatttaggagggctgttgacaatggatatgatgcatttttaaatctagatgaagaaaccatctttttgtggtctgcaaaaattttatatggccttttatataagcaattatctttaccatttgataggaagtcaccgcgattgggaaccattacaagtcctgatctattagagaaatataggattctacatttattgttacaaggtgcgaggtataaaactaaatacgaagggaaaccatggtcaatctttattttccagagtcaagaatataaggatgaaagagattttgattatttcgatggattgttttccttagtgttagggattcgtattggaagagttagctttgtaatttgttttgaagatgcgggcatacagaaagtaatgtttgaggattattttagggatttgcaagagatatcattacatccgattcagtttaaggagatcatagcgaaagtacattataagcaaatcttatttagaaaaaatcctttctttatggttgttgaaggaaaagaaaacgatagaactgttttagtgaatcaaccaacaggagacttatttgatgaatgggatttcgaagattattcaaaaattttatcattgttttttaaaccttatggattacatttaaaagatatttatcacccacctggtaaaaccattagttttttatatggagaagaaggggaagttaaacatataccaaaataggtgtattatgaatgacaagataaataaaaaatgtataatttagggaaataagtcatctttgaaggcattgggaagaacccaatgctgtttttcattgttttacttttttgatttagttaatgccttctgctacctattgatataattcacccattttttctgtttccatagaaacctccagttttatttcaaaagctatatcaaatttatagatgtaggtagctaattaaaaattctttatcatcctcgtcttcaggcaaaataccaagagttttgtactcccataatgcaattctttgataccatctaactcagacgccaaaatatcgacattattataatcaagttggaattgactattgctatccaatgccaatgtatggttagtccaaacctgatcattattattttggtgcgcaattcttaatttctcaaaaagttctcggatttcccttaataaagttttgaagatatctttacttacgttgtattgggcaggtatatcttgtgaataaataatttggattattttctggttacttgaagtgaaagagaaccatggtagaatcatttaatacttctacataaagataaatttttgtccattcataaggtatgatgttatttaatttctgattaataagctgatacaaatcttgcatttttttagtttccaatcttttcaccttcaatcgtcgagaaatcttagttatcaaaatagctcagcagagaagggctgagccatttttgatttatagaccgaagtagtttattacaaattctttgtcgtcctcatctttaggcaatatccctaaattttgatatttccaaacatctcgtctttgaaggtcatcaagttcagaggataaaacattatcataattataatcaattgaaaactttccggtgttttctaattttaaagtgagattagtccaaatatcttggttgcctagtttaaattcctcttttagttcttcaaatagcttttgaatttcaattagcagttgatcgtaaatctcttcactcacatcaaagtgttccggtatataatgagaaaataaataatcactgttatttggtgttgtaaaataaaagtatatatctgctgagtcaccaagtatttcagcatataaaacgatcttttcccattgagatggaatcatttcatttagatgttcagcaatcttttgatatagttcacccattttttgagtttccattagattaacctctaactttgaattgttgatggcattatttaatatttaaataatccttaacaaattctttatcctcttcgtcttcggggaaaatacccaagttattgaactcccaaatcatttgtctttcgtattcgtccaaatcagactcaataacatcttcataatcataatcaattgaaaactttccagagctttcaagattcagtgtcaaatttgtccatgcttcgggattattttctttaaattcagtgtgtaactgcttaaacaactcttggaggtctagtagtagttcggtataaatttttttactgacctgaaattgttctggaatgtcgtgagagtatatatattcatcgttttctggtgtttgaaagaaaaaatacacttctctggaaccatctagtatttctgcataaagaacaactttgctccattcggaagggatcatgtcattaatttgttctgctattttttgatatagcacttccatcttttttgtttccactagattaaccccctggtttattttctatagtaacttgtctcgctctacgattacctatcttatattcaacattaaataatacaggtctaagtgaatctccctgataaaccggttctatattaacttttacttgcttaggaggttttccatttaacgcctttgaccacacttgctccattttgtaccatttcccgccgctcctattaatctgagaattcatcggcacgatattgtcgaactggcctgagcctttgaattgggtggcgattaaatggccgccgtcatcgtcaggctttcggtcctggggctttccagcattcgtctgtgcatattggtttcgttttgcttctcccagctgcaagtctgctttgacacttgtaattctaccatagttgtcagtcgtgtatgtgtagccttcttttgttttgtagatgatattgggcttcagcactttctttctgctccatcttgcgaaatgctcgccgtatttgacggttaccggcggtacatgtggtgctggagttcgtcttccgcttgatgacgttccgtatggtttcggaaggatgaccttggcgaatttttgcagtccttctttaagcgtgaccccgttgactgcgttgtaaggaacgcctgccggcactaaatcgtgacggggatgataggggagaatatccgcaagtgtgagatctccgatttgatttaatttggttttgacgtgtttttttgatacttctatgcctgtgtttactttttgtttgatgtgatcaacggtttgttttgagactgttatggctttttgggctgttgcagatttgcttgctgctgttttgacttttgccgtcactttggcggctgtgccagtttttgagacggcgccaacaccttttgtgccgacaactgatgtgacaacagtgcccactgcatatgagacccatcttgctcttgagtaggtgtcaccattcaccatgtctttttcgtatgattcttcgattgctgctgaaatggcttcatacgttttgatcgggtgagccacagctccggtaatcgcttcaacggttcctcccggatctgtgaccatatcccacaggcctacgaccgcgtccttcccggaatcataaaggccgacggcgacccctttgaagcctgcttcaagctcacgcgtgttttcaatttgggtgaagtatctctgctgttctgctgtcagattttcatagccaatcgtctttgccattgagtagaattcatcggcatccgcataatcatagtttttcagtctttctttcagtttttcaatctcgcgttccttcgcttcctctttcttaatcttcaagtaagcctcagtccgcttttcaatgtcgccttttttcttatgtatgtcactctcacggtacgctttggcgttgtagtggatgggtgtggcgtttttgcctttgcctgttgcttcttggagcttttggaagtcggacttgatgaattgttcgtttggttctgacagggcgtattctgtcttcaggtcttcgtccaaggcgtccaatttttccagtgtttttttgcgtttgtcgttggcatcggccagctcgtctttgaaggtttctgttgaaaacaggtcgagcgggaggatgtcgtcgatatcgttcaggatgtctttcatcgcttttttctgttcggacatgatggattttgattttttattggcatttgccagttcgtgctccaggaaggattcttcgatgtatgcgtcagagagggctttgtccttcgcggctccggcgatgctattgaaaaatgcgattttcatgtcgatgtagtcgatccattggtcggtgacgccgacgtggtcgtgatagaaggctttgatgttgctggcgccttttcctgaaaattcgctgtcactgagatcagcgacactttttaacgcttttctcaagttgaccatttgcgttcttagttctttgtactcttttgcacggtctgtcgcttccgaaagcagtgttttcgcttcaaatactttcatgaccatttcccttcttttgttcgctcaatatcaaaattttaccacggggcgggatgagggtgggggtgagaacgtgttttggtggaaaaatgagtcatttggcatgtgtctaagtacacggttttgatatgatgatgatagatcaattaaaaggggaagagctcatttggataaagatttcttaatcataaagatcaaggatattcaaaaaggcgacacgctaacgaaccgcgcctgcgggaactgggatatgaaattgtccagagcaaaagaatgtaaacgggcaattgttgttcggagcggtgtgattttaaatgtttacaagatcgttgacgcttgggaatcagatgaacccgccaagctcactaaaacgaataatagagttcggtttcaattggcagagtgccatgactattcttatatgattggcggtacgctgaaaacgaaaacgcaaaatccggtttcgagtctatccttagaaaccttaatggaactagtaaaataaaaggagcccagcatgtatctctataaagtaaacagccaaaaccaaatcgaagatattcgcgagaaaccgtttaaaaaagaaaaagagattcaggatttatgtgaaatcaatcttcagcggatgttggggctcaggtttgtgaaatctgaattcaggatcagcaatttccgcattgatacgttagcgtttgatgatgagacaaatgctttcgtgattatcgagtataaaaatacgaaaaacttcagtgttgttgaccagggctacgcctacttagcagcaatgctcaatcataaagcagatttcattcttgagtacaatgaaaatcatgatcttccgttaaagcgggatgatgtagactggtcgcagtcgaaggtcatttttatctcacctgtatttacggtgtatcaaaagcaatcgatccattttaaagatctgccaattgaattgtgggagattaaaaggtacgaaaatgatctgatccagttgaatcaaatgaaggctgatggcgtctccgagtcgattaagaccatttcacggcaaagtgagaccattcaagaggtcagcaaagaaattaaagtgttttctgaagaggatcatcttgcagataaaccgtttgacatcatagagctttatcagcagctaaaggaattcatttttaatttggacgatcatatttcaatcaaaccgacaaagctttatattgcgtttacatcaaataagcgaaatttcactgacattcttcttttaaaaagcggacttaagctgtgggtgaatatgaaaaagggagaattgcatgatcccgaggacagaatgcgcgatgtctctgagaccggccactggggaaatggcgactatgaaattttcataaaagatgatgaacacattgaatatatcatgggattgatcaaacaatcctatgagaaaaataagtgagaacttccattgagaagttcttttttattgtggcatgctaaagaagaattcatttcagtccctttcttcttctgtaaaaatgaaatgtacaaactgacaaaagacctataaaatgagaaagctatcatgagagagcagaagggtgagagagacaatgagttataaattagttgcgatgcttttatcgatactattcctattatcggcgtgttctaatagcggatcttctgataaggatcaggaaaagcaagcagtgaagaaagcgagcgttgcgatgctgacggagcaggaagtaaaatcagctttgaaaaacgatattgattcgatctttaatgcatttgataaagcgggaaaagaaaacggctggagcacggcaaacaaggcggatttcaacaagctgcggcctagtgtgctgccttatgcaacagaaacgtttgcagatcagaccttaaaggatttggccggagagtactattgcgagtgtgatgatccttttcaacccggctctgatttcgatgtgcgttttacatatgaacaggacaagaataagatagaggcttcatcaatagacccggcaacagaattaaacaacatgggcacggaatggacgtttgaattgatgaagcaagacggtaattggaagatcaacaaatgggacagcaagtcgcttcaaggggatgatatcaagctgacaaaagaagaagcgaaaacgattctgtctagaaacggtgaaacggcggaatttgtgaagtcctatgaatcgaaggctgccggcggaacagcttatcttttcaatgtgaaaagttcaaatggggaaagacaggcggcgatcagctcaaaggataccagtctggtaagtgataatgaaaacgagactgaagctccggagcaagagacagctcagacgactgcggaaaccgcatcgcctgatacagcggatacacagagcagtgagcagacaacaggaagcacaaaagcagattatgttgccaaattgtcagcgacagaacagaaagaaaagcacaatgactatcaaagtgattatcagatgattgaggattacggttacaattatcaaatgtgggacggattgctgaacgagatatacggcgtgctgcaaaagcagctttctgccccagacatggcggcattaaaagtgaaacagcgccaatggataaaggatagggatgctgcagcccagaagcgatatgatgaggagggcggcggttcattatcccgagtcgtccaaacggaagagcttgccaaacagacgaaagagcgctgttacgagctggtgaatacgtatttgaaataagattgacatgggacccttgcataaagggttcttttttatgaaaaaaacaaattgacaggatgaaaaaacaatttcttccttctatattgttttcaaaatttgggattgatagaatatgacatatctcatagagaaggagggaagccgttgagtcaagccataccgtcttcgcgtgttggtgttaagattaatgaatggtataaaatgattcgccagttcagtgttccggatgctgaggttctgaaagcggaggttgagcaggacattcagcagatggaagaagaccaggatttgctgatctattattctctgatgtgttttcggcaccagctgatgcttgattatttggagccgggacaaacatacgggaatcgccctacagtgacagagcttcttgaaacgatcgagacccctcagaaaaaactcacaggccttttgaaatattactctttgtttttccgcggcatgtatgaatttgatcaaaaagaatatgtggaagcgatcgggtattatcgcgaggcggagaaagaactgccgattgtgtctgatgaaattgagaaagccgaattccattttaaagtggccgaagcgtattatcacatgaagcaaacccatgtgtcgatgcaccatattcttcaggccttggacatttatcaaaaccatcccctatacagcattagaacgatacaaagcttgtttgtgatcgccggcaactatgatgatttcaaacactatgataaagcgctcccgcatttagaggcggcgctagatttggcaatggacattcaaaatgacaggtttatcgccatttctctattgaacatcgcgaacagctatgacagatcaggagacgatcagatggctgtagaacatttccaaaaagcggcgaaagtaagcagagagaaagtgcctgatctgcttccgaaagtcttgtttggattaagctggacattatgtaaagcgggccaaacacagaaggcgtttcagttcatagaggaaggattagaccatatcacagcacgttctcacaaattttataaagaattgtttctgttcttgcaggccgtgtacaaggagactgttgatgaacgaaaaattcatgatcttttaagctatttcgaaaaaaagaacctgcacgcgtacattgaagcatgtgcccggagtgctgccgctgtttttgaaagcagctgtcactttgaacaagctgctaagttttaccggaaagtgctgaaagcccaagaagatattctaaaaggagagtgtttatatgcctattaagaaaaaagtgatgatgtgtctggctgttactttagttttcggaagcatgtcgtacccattcctgacaaactccggcggcgttaaggaatcaacagatcgaaatacgacgtatatcgatcattccccttacaaacttagtgatcagaagaaagcccttagctagggctttttcttgctttacggaagacgttccattttccacatcacggcattccttctatttctaacgcaagacactcgaaacaaccaaaccatttgaggtataatggataaagtgaataacagtatttagattgatatatatgaaagagagtggaacatcatgggccgtaagtggaacaatattaaagagaagaaggcgtctaaggacgcaaatacgagtcgaatttatgcgaagtttggccgtgagatttatgtggcggcgaaacagggcgagcctgatccggaatccaaccaggcgctgaaggttgtgcttgagcgtgcgaagacttacagcgtgccgaaaaacatcattgaacgtgcgatcgagaaggcgaagggcggagcggaagagaattacgatgagcttcgttatgagggcttcgggccgaacggatcaatgattatcgttgatgcgctgacgaataatgtaaaccgtacggcgccggaagtgcgtgcggcgttcgggaaaaacggcggaaacatgggtgtgagcggatctgttgcttacatgtttgacgcgacggctgtaatcggtgtggaaggcaaaacggctgacgaagcgcttgaaatcctgatggaagcggatgttgatgtacgtgacattttagaagaggatgacagcgtgatcgtatatgctgagcctgatcaattccatgcggtgcaagaggcgtttaaaaacgcgggtgtcgaggaatttacagtagcggagctgacaatgcttgcgcaaagtgaagtaacgcttccggatgatgcaaaggaacagtttgaaaaattaattgatgcattagaagatttggaagatgttcagcaggtatatcataacgttgatttaggtgagtaaggagtgagcaggctgttatggcctgctttttttgtcccggaaattgttttagctgtatgtaggcggccgcctatacgatctataagatattctcatactctggactgtaacctatgtgaaggagagagtgaatatgactgatacaagacatatgtatggcggacctggttttggtcattatcagggctttggtattggccacccgggttatggcatgtatggaggccacccgggctttggcatgtatggaggctacccagatcacggcatacatggaggtgtcggcggctatccgggatatggaacgtacggaggatacggaggatccggcggttacccaagcggcggctatggaggctctccgggaactgtaaattatccgaacatgcaccatgaaaatgatggccatcaccactattatcaccatcatcatgatggaaaagataatcttcatcaccatcatcatgatggtcattatggccaccatcaccaccatatgggccactggggaaaagacggttataaataaagaagatgatggtataaagaggacactcttgcagatcaagagtgttttttatcttttttcttgactgttcagtctggaaactggtaacatttgtttcaggaggtgatcgtcttttggggaggaataaagaatttgatacggcacttgttcttcacagggcgatagaggtttttggagagtatggctacgaaggaacgtctcttcaggatctgctctctcatttaggcattgcgcgccagagcttgtatgatacgtatggcacgaagcgtgatttatttttgtccgctgtgaaaacgtatcttgaagggaaaaacactgccgttatggaaaggcttgaagcgccaggatctgtaaaggaagccattcgtgatatttttcaagaaggtgtcaatgctctgagggaccctgaacgggcgaaggcgtgctatatcattaacagcgcgattgaacagattccgcatgaccctgagcttgccctgtattttgaaagacaatccaagcagcttgaggacgctttttatcaggcgcttttaagagcgaaggaccaaggagaattgaatggcgaagatactgatatatctgcgcttgcccggtacctgaatcaaagcaggctgtctctgacatttgttgcgaaagtgacggctgatatggatcggcttcaggaccatgttgacgtgagtttatcagtgcttgattaacatgtggtaaaggattctttgcccatgtatgtatttttcggactgaatagtctagaaataaaaatgaggtgatgatgaatgttgatgaatgaatttgaaaaagcatgtgaaacattgagaaagtttatggcttatatgcttgagaaggacatgaagagctggacggagctttgggatgagaatgctgtatttgagttcccttatgcgccggagggatcaccaaaaagaatagaaggaaaagcggccatttacgattatattaaggattatcctaagcagatccatctttcttcatttaccactccgacagtgtaccgttcagcagactcgaatacggtgattgcggagtttcaatgtgacggccatgtgattgagactggactgccttatcgccaaagctatatcagtgtcatcgaaacgagagacggccgcattgtgcgttatagggattattggaatccgcttgttgtaaaagaggcctttggaggatcatttttgcaaacagaggagagtgggaaatgatgaaacagaatccgattttaatcacgggcgggactggcacagtcggcagccgaatcgccagccgtttaataaagctgggatacagagtgcgtattgcaagccgaaaaaagggcgcgcttgcaagtgcggagtatgtgtattttgattggaaggatgcctccagttttacgcctgctctagaacaggtaaaagacatctatcttgttgctccggttggtgtacttgatccggctccctatgtgcttccctttttaaaggaagcaaagcgtctcggcgcaaagcgggtagtgatgcaaagtgcgtctgttgtctccgagaacggtcccgtgtttggcgcgcttcaccaggcagtgcgcgagtttccagaatggacggtgctgcggccctcatactttatgcaaaatttcatcaatgtccagcaccgcatgtctattcaaacggaggggcgcatcacaacggcttcgggtgaaggaaaacttgggtttattgacgctgatgacatcgcagaaacagccgtcagggctttgattgatgatgttcctcatcaaacacatcatattctgacaggtcccgaggcgctgagctatgccgaagcggcggagatcattggagctgcggcgggacgccgggtggagcatgtcagcatttctcgttccgagctgcagcataaaatggaggcaggaggtttgcccgcggattatgcccattttatggcgaagcttgatgaggcaatcagccatggtgcggaacatcgggtaacggatacagtgaagcatgtgacgggaaaagaacctcgttcgctgtcagagtttgcggctgctcatgctgcatattggaaacactgacctcattttggactgaatagtctagaaagaccttcggcgcttccgaaggtcttcttattgaaaaagctaagtcgtgttttagtcataatcatgcctcctgcctcatacctattaaggtcattgtttttgagaaaggaggagccggaatgaaggatatgcagccgtttacgcctgtcaaatcatatacgccctttcacagccgttttgatccctgtccgcccatagggaagaaatattacagaacgccccctaacctttatatgacctttcagcctgagcatatggagcagttttcgccgatggaggctttgaggaaaggcaccctttggaaggatctctatgatttttatgaaaacccttatcgagggggagacgcacatggcaaaaaaggttgacgccgaatattatcgtcagcttgagcaaatacaggctgctgattttgtgcttgttgagctgagtctttatttaaatacacatcctcatgatgaagatgcgctgaagcaattcaatcaatattccggctattcaaggcacttaaaaagacagttcgaatcctcttacggaccgcttctgcagttcggcaacagccccgcgggcaaggattgggattggggaaaagggccatggccgtggcaagtataaggaggaatgcctgaatgtgggtgtatgaaaagaagctgcaataccctgtcaaggtcagtacgtgcaacccgacgctggcgaagtatttgattgaacagtatggcggagcggacggcgagctggccgcggctctccggtatttgaaccagcgttatacgattcctgataaggtcatcggccttttaacagatatcggtacggaggagtttgcccatttggaaatgattgcgaccatggtctataagttaacaaaagacgccacaccggagcagctgcgtgaagccgggcttggcgatcattacgtcaatcacgacagcgcgcttttttatcataatgcggcgggcgtgccgtttaccgcgagctatatccaagcgaagggcgatccgattgccgatttatacgaagatattgccgcagaagaaaaggcgcgggcgacgtatcaatggctgattgatatttcggatgatcctgatttaaacgattccctgcgttttttgcgtgagcgtgaaatcgtacactctatgcgcttcagagaagcggttgaaattttaaaagaagaacgggataaaaagaagattttctaataggcagattggcctctctttcatacacccttttacatacagagaaaatggtctgtttttgcagtttggtctgcattataatcaagggtgtgtaagcttactttttgattgggaggcctttatgtcagcttttaagattgagaacgaaacgattgcagatggattttacgcgtgtccggccgtctatgaggatgcagaatcgattaccgggttgctcgtccgaacagctgaatggctccgggatcggggttctaaccaatggagcggacttctcaaagggcaagatatacatgatatcacggggtcaattgaaaagggacatgtgtttgtgtttaaaaaagatgaagagcttgcggctgtcgtgatgctgctgcctgcaccgagcgagtgggaccggaagctttggggagacgatgggcatgaggagtccatttatttgcatcgcctcgcagtaagccgccggtttgcgggacaggggcttggagcccgcgtccttcagtgggcggagacgggcatacactttccgggaaaaacacggatccggcttgactgtgtcgctgataacgacgccctgcattccttttatcggcgtatgggatatgaattcatgggtgctgatgcgtccggatatcatttgtttgagaaagagattacggcagaataagcgtcctttgcagggggcttttttgtcttttctaaaagggagggcaggcgatgttgtggccaattttatttgtgacagggattgtgacggcttgtctgtttgctggcgtatccgttttgatgcggatgagatttcctgacaaaagtcggccggaatggatgttggccgggctgatcgtccttggtgtgtttgcgatctggtacagcctcgtgtatgtacgcggctgggaaggggctgcgctcggaatgcttggattcaatgtcattttcggagccattgccggatatttgatcgataaggccatccggcgttacaggaaaagataaggctgctgccgtctctcatcatgtcgaaattttcacagaccggcaggaattttctttcgaaaggagaaatacatattactttaaaatgaaagcgttttccaaagcgggaaggtgatgttgatgatacacagtgtgacaaatgggctgaatcgtttttgtacgtgggtgatgagactggcctatttgaatgtgctttggattttgttttctcttgcaggcctggttgtgtttgggctgatgcccgctactgccgcgatgtttacagtggcgagagaatgggcgaaggggaatacagatgccccggtgttttctgtcttttttcgggcgtttaaaaaggaatggcgggcatcacagatcctcgggcttatcgttgtgacggctgccctgtttctgtttgcggatatgcggatagcggctcagatggaccagcctgtgctcgtcaatgtattcctgagcattagtttgattttcgcgtttgttgtgctgtatgtgttcccggtattttctcattttgacgtaaaaatcagagaggtgctgagcatcagctttttcattgccttcagccgtccggcggtgacgcttttgatggcggcgggcgctgtcggtgtgctttgtctcgttctgtttcatgtcacgtttctattgtttttcagcgggagtttactcagcctgatcttaacgaagctgtcctttaaagcgtttcggtcaatggatcagcggcaggagaaagaaaaggcggcatgaagaaaagagttgctggctggtacaggcggatgaagattaaggataagctgtttgtgtttctatcgttgattatggccgtatcctttctgtttgtatacagcggggtccagtatgcctttcatgtgtatgatgagcagatttaccgcaagtcctcggaggtgcttcggatgtcttctgaaaggatcgaagacgagctgaagaagatagaggatgtgtcatatgaaatcattacggacgaacagattcagcgcatcctgagcatgcaaaatcgcgatgatacgtacgatcagtatcaaatgaagcaggagctgtgggatcagctggcgggatatgccagcgatgaaaagtacatcgattccattcatgtgattgatgcccgcggctcagagtattcagccggaagcagttcttcagatcttttgcagcaggagcaggaagaggtatttaagcgagcgaaagcgaaaaatggaagaaatctttggatgacgctcggcgggtcagatcctgtcctgatttcagcacggcagatcaggtcctatcaccagctgagtttgaacggcttgggcatggtgctgatccaggtcaatgtaaaacagatgattcgtgatgtgccgaaggattggggcgattcagtcggagacattatgattgctgaccaaggcgggaatttggtgtatacggcacatgcatcagcgcatgttcctgaggcagcaaaagagacgctgaagcaccccggttatgacttgataaaaaagaatggcaaacgttactttatttcttatcttcaatcatcctaccaaaattggagctactataacgttatcccctttgatcagatgttcgcgaaaatttcctttatgaaaacagtgatcggcacatgctttctcctctttttctgtgtggttttgcttttcggaaggaaaatcgccaacagcatcacggagccgattgaacagcttgtgaccgcgatgaaatcggtacagcacggcggcattgaagcaggtgtgtcgctttctctgccggaacatacacaggatgaggccggcatgctgaaccgtcattttactgtcatgatgaaacggattaatgagctgatggaagaaaatgtggaaaaacagctcatcattaaagaaaccgaattgaaagcactgcaagcccagatcaatccgcattttttatataacacgctcgagtccatcaattggctggccaaggcgaatcagcaaaagcaaatctcaaaaatggtggaatcgctcggttttcttctgagaaacagcatacatatgaaaaaggatatcgtgaccatacaggaggaggcggacattttacgtcactatatgaccattcagcgatttcgatttgaagagcgcctgaatttcacgttggatattgacgatgaggtgaagcattgcctcattccgaaactgacgctccagccgcttgcggaaaatgcgattcaatacgcgcttgaaccctttacaaggccatgcgccatccggattcaggcgaaaaaggcaaaggaatgtgtctgtattacggtcgaagataacggccctggcatggatggacggattcttgaatcaacgggcggaagaggaatcggactttggaatattcgcgagcgcatcagcctgacattcggagagccatacggcttgcggattcatagtgagcatgaaaaggggacgaggattgtgatcacaataccgtgccgaaatgaggtggtgtgatgtataaaatactgctggctgatgatgagaggattatccttgatggaatggcaggaatcattgagtgggagtcgcttggcgcctcattgatcggtaaagcgcagaacggacatgaagcatatgaaaagattgtacataagcagccgcatatcgtcatcacagacgtcaaaatgcccggcatggacgggcttgagttgatcaaaaaggtgtcagccatcagtccgtcggtgcaatttatcgtcctgtccgggtttggagagtttgagtacgcaaaggaagccatgaaatatggggtgaagcattatttgctgaaaccctgcaatgaacagcagattatcagctcgctggaggaaatcattgctgagctgaagcggcaagatgtgcacaaaaagaaaacagcccatctgaaacacgagctggaccatatccgttcctttgcagccgatcaatacttggaaggcttgatcgcaggtgtagcccagttgtctccgccgccttcacttgccggaaaaaagatccgcctcttgatcttaaaaggggaacaatctattgatgccacaaccagagaggcactcggatcggcactgacagcggtttgcagcagcggagaatggacagtgctcgccgtagaggagaacgccgctgaaaaggcggcggaggtttttgcggaccgcaagatggccatcagtcaggcgggagaactccggcacgcggggcagctgtttcgtgacacagctgaagcgtctggtgacctgcatgggagcgcagtgatttcaaaaatgatcaggcttattgccgacgagctcggaaatccgaatctgtccttaaaatgggcggcgaaggatatgctgtttatgaatcctgattatctcgggaagttatttaagcaggaaacaggcgagaaattttcacaatatgttacacgagtgcgtcttgaacatgcgataaaacagatgaaaatgaggcgggatgcgagtgtatcagaaattgctgaagaaatcgggtttggcgataatccgaagtatttcagtcttgtttttaaaaaatataccggtctgacaccgtcagaattcagaagaaaacagggaggcgcttccgcaggatagccatctctgtttttttgactttcgccactgttttttgagtgtttcgccctatccgaacgctttaaaataaaatgtaagcacttacattaaaaggggggattggtttgaagaagatttgttacgttctgttatcgcttgtctgtgtctttattttcagcgggtgttctgtgggcgaagaggcctcggggaaaaaagaagacattacgctcagaatcgcgtggtggggcgggcagccaaggcatgattatacgacaaaggtaattgaactttacgagaaaaagaatccgcacgtccatattgaagcggaatttgcgaactgggatgactactggaaaaagcttgcgcccatgtctgccgccggccagcttcctgatgtcatccaaatggataccgcttacttagcccaatacggaaagaagaaccagctggaggatttaacgccgtatacaaaggatggaacgattgacgtcagctcaatcgacgagaatatgctgtcgggcggaaaaatcgacaataagctttatggatttacgctaggtgtcaacgtgctgtctgtgattgccaatgaagatttgctgaaaaaagccggtgtgtctatcaatcaggaaaactggacgtgggaggattacgagaagctggcgtatgatcttcaggaaaaagccggtgtctacggttccaacggaatgcatccgcctgatattttcttcccttattatttgcgcacaaagggtgagcgcttttataaagaagacggcactggcctcgcgtatcaagatgatcagctgtttgtcgattactttgaacggcagctgaggctggtgaaagcgaaaacgtccccaacacctgatgaaagcgcacagattaaagggatggaagacgattttatcgtcaaaggcaagtcagcgattacatggaactactccaatcaatatttgggctttgcccggctgacagactcgccgctgtctctctatctgccgccggagcaaatgaaggaaaaggcgctgacattgaagccgagtatgctgttttccattccgaaaagctctgagcataaaaaagaggcagcgaaatttattaatttcttcgtgaataatgaggaagcgaaccagctgattaaaggcgagcgaggcgttccagtctccgacaaggtggcggatgcgattaaaccgaagctgaatgaggaagaagccaacatcgtggagtatgtagaaaccgcgtcaaaaaacatcagcaaagccgatccgccagagcctgtgggaagcgcggaggtcatcaagctgctgaaggatacgtcagatcagattctgtatcagaaggtatcgccggaaaaagccgccaaaacgttccgaaaaaaggccaatgagatattagagaggaataattgacgggaatggggctgacgcaatgaaaaaaagccggagtataagaaaagacaatctggcgggatatgcttttatttctccgtttatcatcgggttcctatgctttacggtgatcccgatgggggcgtccctgtttctgtccttcacgagctatgacttgtttacggcgccgaaatggatcgggctcgacaactttaaggaaatgtttacgggtgacgaaaagtattggcagtctctgaaggtgacgtttacgtatgtgcttgccggggttccgctccgtctcggcttcgcgctttttatcgctgtcattttaaacaatgcagcaaaaggaacggccatttacagaacgctcttttatctgccttcgatcatcggcggaagcgtcgccgtggcgattatgtggcgcaatatttttggcaatgacggggtcatcaatgcgctgctgttttttgtcgggattgaccaaaaaattctttggtaccagaatccgacaagtgcgctgtggacattgattctgctgtccgtctggcagttcgggtcgtcaatgctcatttttctggccgggctgaaaaacattccgtcttcgtatttggaagcggcaagtgtggatggggcaaatcgggtgcagcgtttcttcaagatcacgcttccgatcctcacaccgattattttctttaacctagtgatgcagacgatttctgcttttatgacatttacacctgcctatatcatttcgaagggcgagggcgggccgcttgacgggacacttctctattcgctctatttgttccagcgtgcgtttaactattttcaaatgggctacgcatcggcgatggcgtgggtcatgcttgtcattgtcgggctgattacgctcatattgtttaaaacatcgtcatattgggttcattacgagtcaaaggaggaatgacggatggagccggtcaacgagcctgtcagaaaagccccggtttttgaaagaaaaaaagccgggcgcgtcagtcccaaacgcatactgttccatgtttttacagcaacgctggcggtgttactgctgtacccggttatttggctgtttgtcagctcgtttaaagaaagcgccagtatttttacaacctcacattctctcattcccgacccttttattctcagtaactatgctgaagggtggaagggtatcgcgggacagccgtttctgacgtttattaaaaactcggcgatcattgtcggactgtcaacaatcggtgccgtcctgtcatcggctgtcattgcgtatggatttgcgcgtattccgtttaagggaaaaaaattttggtttgcgtgcatgatggggacgttaatgctgcctcatgaagtgttgatgattccgcagtatattatgtttgcgaaattagactggctgaattcctttaaaccaattgtcgttccgcaatttttcgggcatgcgttttttatatttctgatgatccagtttatccggacgattcccgaggagctggatgaagccgcgcgaatcgacggatgcgggcgctttgcctgcttttggcgaatcattctcccgctgattgcccccgcgcttgcgacgtctgcgattttctccttctattggaagtgggaggagctgattcaaccgcttttgtatttgaataagccggagctttaccctgtttcacttgcgctgaagctttttctcgatacagagtcggcttcgaactggggcgcgatgtttgccatgtcggccgtctcgttattgcctgtgattcttgtattctttttgtttcagaaatatatcgttcagggcatcagtacgaccggattaaaataaaaaggagtgttgcagatggcacagcttatctttgatgaagaaaaggtgacgtcggttattgaccggatcgtgaaacggacatttcagatggattttgcgtgggattggccgggcggcgtcgcgttttacggtgtggcggaggcctatgaagcgacggaaaacgaggaatatatcaatctgttaaaaacgtgggtggatgaacagctggaggatgggctgccgccgctttcgatcaacggagtttccattgggcatacgcttttgttcctccacaaggtgacaggtgatgacgtgtatttggaaacagcggccgagatggcggaatatgtgctgcataaggcgccgcgctttggcgagggtatccttcagcatacggtgaatgcggcagaatacgtattccctgaacaggcatgggcggatacgctgatgatggctgggctgtttatgctgagaatcgggcggatcatggagcgtgaggattattttgaagacggtctgcgccagtttcacggacatgaggatgtgcttcaggaccctgtcacgaatttgtactaccacgcctgggacaacaaagcgcaaaatcatctgtcggggatttattggggcagagcgaacggctgggcggcactcacgatggcaaaggcgctcccccttattgaggtgacacatccttcctttatgatcatcgacggatcgctcagagaccagctgagcgcgcttgtccggcttcaggatgaatcagggctgtggcatacgattttggatgatccggattcttatctggaggtttcggcatcagcgggtattgcttctgctctgatgtcgagcggaaagctgtatacaaaatatgtgcagaaatcgcttgccgccattttggatgcggtggaagaggacggacgggtcagcaaggtatcggccgggacagccgtcatgaaaaatgccgaaggatacaaacaggtgccttacaaacgaatacaaggatgggggcagggacttgcgctgacgtttcttgctgatgttttgaaaacgaaaaaacgcgtgtatcagtaaagacagcggcggggggaaagggatgaaaaaacagcctcaacagaaggaacgggtttctcgctggaagggaaggtatttcaaaagaaactttgtcttcattttgctgattgcctgtattcccggattgctgactggcggcgcaatctactttctttcgatcgacaaggtggagaaagagctgcagagatcgcatgaaacacaggtggcgcgtgaggtcagccgaatggatgagaagctgggagtgcttgaactggcactcacccagatggcctacgattcttcactgatgaacggattggccgagagggatttggagaaagactttacgttctcctatcaattaacgaaaaaactgtttcttttgcgggaccagcagccgctgatcgagcaggcttccatctttctgaacagcccccggccacttgtgctgagccctgaatacagcgctttgacagaacaggaggcgcttcgcaagtatcgctcgctacttgcctcagaccacagcatttattggaaacggtcgggaaatcaagcgatgctgatccagctcattccgggcgcggctgagaaaccgttcggcgcgatcatgctggcggttgatccgaaagaaatggaatcaatcctgcaaagcttgtccccctatcctgatggcagtgcgctgcttttagatcaaaatcaagaggtgctgtttcatgaaggggaaaaagattttaaaaagactttacttcaagagataaaaaaacagcctgctgagaaaggtcatattcagatggaatgggaaggcaaggtgtattctgtctcctttggagaaatgaaccggatgcatcagcaatggacctttgtgtcagcggcgcctctttcagctattacagcgccgatggtgtttttatcaaaagtgatcatcgtgatgctggtcatttgcatcggtttggcggtatgcatgacatggtatgcatcaaaaaaaatctatcgtcccattcagcatttgcttggcttgtttaccggtggagagaagaaagtatggcaggcgtccgggcaggatgaattcaagtggattgaaaagagatggcaggatctatcccttgaaagccggaagctccaagagcagctcctgcggcagacgccccatatgaaaaagagttttttgcagcacctcttgcagggggatttttactatgacaacgaggacagtctcagatctcggatggaggaggccggctggaacatcggcgaaaacgtgtttcatgtgctggatcttcaattgacaggactccgctgtgaaaaaagcatcttctgttgcgatgatgaacagctcgctgtgtttacactgactaatatcgctgaggaattggcggataaacgcgtttttcagctctccatacttgatatcggccggctttctgtcaccgttcttgtgatgaaaacaaacagctctgatctgaaggcgtatataacggagctggcacgccaatttggagatgtaaccggactatgcctgacctcgacattgagcagcaagacggagcgtgtcacggaaattccttctttatttcaggatgtgaaatgcggcaaatcccgcaggaagtttgctaaccgggatcaggtcattgatttgcaggccgacttccctcaggatgagcagttcgctccttattacccttttgagctggaaaaacaaattgttcaggccatccggctggaaagaaaacaggaagccgaggaactgatagatggatgtatgagggaactggcggaaaaggcggccatagacaggcatgtgcattccgccctgattcagctgttttcccgcattcaggaggatattttgcattccgggctcaatcctagcgaactgtttcagcatcggaacccgtttcttgatatttcagaattgcgcgaacctaatgaagcggcggcctggctgatggatgtagtggtgacgccttacctttccaagcttgagggcagaaaaaacagacagcaaaagcagctggcagaacgtgtgattgcgatgattcacgaacagtatatggcggatatttcattggaaagctgtgccgatgcgcttggcatgaattcatatacgttaagcaaggcatttaagcaagtgaccggcattaattttatcgattatgtgacccagatcagaatcgaaaaggcgaaagaattgctggtcaatacgaataaaaaaattcatgacgtgtcagaagaagtcggttaccgccacaattactttaaccggatttttaaaaaacaggtcggcatgccgccgggtgtcttcaggcaaatgtatcaggaaacgccgtgaaaggagagaacatgtgatgaagaaaccgattcaagtatttttagcgggagattccactgtgagtgactgcccgcctcatgaagcgccgatggcggggtgggggcaggtattcgggcaattgttttctgaagaggtagtggtgcacaatcatgccaaaggaggagcgagcaccaattcttttgtggaggaaggaaggcttcaagcaattgccgaacgcatcacacaaggcgattatctgttgattcaattcggccacaatgaccaaaaaccgcgggggacgaagccgtactccacgtttcagcaatttctcaccctgtttgcagatacggcacgcgaaaagggcgcgcatcctgtgttcgtcacatcggtgcagcgccgccgcttcgatgaaaacggacgaatcgagcattccctcggtgagtatcccgatgcgatgaaagcactggcgaaggagctcgatgtacctgtgattgatctgcttgcgaaaacaaaggtgctgtatgaagcatacgggccggaggagtcgaagcgattgttcgtttggtttcagccgaatgaacatccgaattacccggacggcattgaggacaatacgcatttttcggaagaaggtgcaatggaggttgcgaagcttgtggcagaaggccttgaagagatcggacttccgcttaaggaccaccttgtgagccgggagggaaaagaacatgtataaggaaggcacttgcttgtaccgcaatccgctccggtctaaaagcgatgtgaaggactggcggatggagggaggcgggcagatctcatttgacgatcacagcttgcacctgtcacatgtccaggatgaagcgcactttgtcttttggtgtccggaaacctttccagacggcatcattgtgacatgggatttctctccgattgagcagcctggactgtgtatgctgtttttttctgctgcgggaatgggaggcgaggatttgtttgatccaagtctccagaaaagaacgggaaaataccccgagtatcattcgggggacatcaatgcgctccacctgtcgtatttccgcagaaaatacgcggaggaaagagcgttccgcacctgcaatttaagaaaaagccgcggtttccacctcgccgcaatgggggccgatccgctgccttctccagacgacgctgattctccgtatcgtatgaagctgatcaaagacaaaggctatgtgcacttttcaatcaatggtctgcccattcttgagtggatggacgacggcagcacatatgggcctgtgttaacaaaaggaaaaatcgggttccggcagatggcccccatgaaagcagcttacagggattttgtcgtgcatcaagcggtgagaagatgaagacgactgtaacggatgcgctttatgcaggctgcgaagcggtggtgaaaatagcatggctcaacgggctgtggctgttgtttacacttttgggcggcgttcttttcggatgggcgccgagcacagccgcgatgtgtgccgttataaggaaatggctgatggggcaaaaggatgtcccgatatttccgttatttctcgatacctataaaaaagagtttctcaaggttaatgcgatcggattggcgttttgggctcttttgctcatattgtccgcgaactatcattatttttctgccagtacggattggctgtcctttgccgtaacaagctgcacgctgcttgcagggcttttgtatatcatcgcgctgatgtatgtgtttcccctttatgtgcattaccagctcccgcttcgcaaatatataccgcaggcactgctatttggcgccatgaggccgctgacaactggctgtatgctgatcgggtgcggatttgtcctttatttgctttatacgcttcctggcctgatcccattttacggcccgtgtttatttgggcttgtgttgatgttttttgctcttaggggatttcaaaagacggaggcccagcaccatcaagccgggtaacaaaaaaatgacaaatacgcaaaaaagtgcagtgtccgaaataggcagatgcaaaaaagtgaaattgaagacagctcacacagcgcataaaatccaatttaagtaagcgcttacaaataaatgagaaggagctgtctgatgattacacgaaggaaacgcatgtttaccgctgttacgttgctggtcttgttggtgatgggaacctctgtatgtcctgtgaaagctgaaggggcagcgcggcagatggaagcgctgaaccgggggcttgtagcggtcaagacggacgggggcatttttgtcagctggcggtttcttggaactgaaaacgcatctgttttgttcaatgtgtacagagacgggcaaaaactgaatgctgcgcctgtcaaaaccacgaactatgtggataaaaacggttcggcgggctcaacgtatacggttcgggctgttgtaaacggtaccgaacagccggcttctgaaaaagcctccgtatgggcgcagccgtatcattccgtcccgctggataaaccggctggcggcacgacgccaaagggtgaagcttacacgtacagcgctaatgacgcaagtgttggcgatgtggatggtgacgggcaatacgagctgattctgaaatgggacccgtctaactcaaaagacaattcacaggatggctatacgggtgacgtgctggttgacgcgtataaactggatggcacaaagttatggcggatcaatctcggcaaaaacatcagagcgggcgcgcactacacccagtttatggtgtatgaccttgatggtgacggaaaagcggaagtggcaatgaaaacggcagacgggacaaaagacggcacgggaaaagtaattggaaatgccaatgctgattacagaaatgaacaggggcgtgtgctttcaggccctgaatatctcactgtgtttcaaggttcaaccgggaaagagcttgtcaccgcaaattttgaaccggcgcgcggcaatgtgtcggattggggagacagctacggcaaccgtgttgaccgttttctcgccggcattgcctaccttgatggacagcggccgagcctgatcatgaccagagggtattacgctaaaaccatgctagttgcctataacttcagggatggaaagctgtcaaagctttggacgctggactcctcaaagtcaggaaatgaagcgtttgccggacaggggaatcacaacctgagcatcgcggacgttgacggggatggaaaagatgagattattttcggctcaatggctgttgatcatgacgggaaaggcatgtactcgaccggcttaggccatggggatgccctccatacaggagatcttgatccgggccggccggggcttgaggtgtttcaagttcatgaggacaaaaatgcaaaatacggcttatctttccgggatgctgcaaccggaaaaatcctttggggcgtttatgccggcaaggatgtaggccggggaatggctgctgatattgacccgcgttatccgggacaggaagtgtgggcaaacggttctctctactcagcgaaaggagtcaaaatcggaagcggggctccgtcctcgaccaacttcggcatctggtgggacggcgatctgctgcgggaacagctggacagcaaccgaattgataagtgggattatcaaaacggcgtatcgaaaaatgtgctgactgcatcaggcgcagcggctaacaacggcacaaaagcaacaccaacgcttcaggctgatctgctcggtgactggcgcgaggaagtggtgtggagaacggaggacagcagtgcactgcgcatttacacgacgaccattccgactgagcacaggctgtatacgctgatacacgatccggtgtaccggcttggcatcgcctggcaaaatgtcgcctataaccagccgccgcacacaagcttctttttaggagacggcatggcggaacagccaaaaccaaatatgtatacgccttaactgaaagggggaaggaacgggctgcgcgcagcccgttcccattaaaatgaaaccaaaaaagaggcaaatggaatacctgaccagaggtttgattgcggtaaagacagaacagggcgtgtttgtcagctggcgttttctcggcacggatcatgagacgacggcttttcacctttatcgggatggaaagcggatcacccgcgatccaatcgatgaaagcactaattttctcgatcaaaatggaacggctgactctgtttatcaagtggcggctgtcaataaaggacgggaagaaaagctttccaaggaagctcgtgtttggcaggaaaatgtcctggaggttccgcttgccaaaccggaaggcggtgtggcgccggacggaaagccgtacacttacagcgccaatgatgccagtgtcggggatatagacggggatggagaatatgaaatgatcctgaagtgggacccatccaattcaaaagacaacgctcatgacggttataccggggaggtgctcatagatgcctataaactggacggcacctttttgtggcgcatcaacctcggcagaaacatcagagcgggcgctcattacacgcaatttatggtgtatgaccttgacggtgacggaaaagcagaaatcgccatgaaaacagctgacggcacaacagacgggaaaggacatatcatcggtgatgagcatgccgattttagaaatgaacagggaaggattctgtccggaccggaatatttgacggtgtttaaaggagaaaccggtgaggcgctcacgaccgtggaatatgaaccgccccgcggcaaactggaggattggggagacggctatggaaatcggatggaccgttttctcgccgggatcgcttatttggatggggagcggccgagcctcgtgatggcgcggggctattatacgagagccgttctcgtagcatacgatttcagaaacggaaggctcaaaaaacgctggctatttgactccaaccagcagggccatgaagcgtacgcaggacaggggaaccacagcttgagcgtggcagacgttgacggagacggaaaagatgaaatcatatacggcgcaatggctgtcgatcatgacggaaccggcctgtactcaacggggctcgggcacggagacgcgatgcatgtaggggatctggacccgtcacgaaaagggcttgaagtgtttcaggtgcatgaggacgccacgaagccgtacggactgtcactgcgagatgccggaaccggtgagatattatggggcgtccatgctggaactgacgttggccggggcatggcagctcatattgatccaagctacaaagggtcgctcgtctggggaattgatccgccgggcaatgatggcatgtcgtatgggcttttcacgagcaaaggcgaaaaaatcagcgacaaagcgcccgcttcagccaatttcgccatctggtgggacggtgatttggtcagagaactgcttgatcatgactgggacggaacgattggcaggccaaagattgaaaaatgggatgctgaaaacggctgtctgaagacgatatttcagccggccggcgtgctgtccaacaacggcacgaaaggaaacccggttcttcaggccaacctgttcggagactggcgggaagaagtgatatggagaacggaagacagcagcgcgctccgtatctatacaacgacacatctcacccgccaccgcttttacacgctgatgcatgatccggtttacaggctcggcatcgcctggcagaataccgcctacaaccagccgccgcacacgagcttttacctcggaacgggaatgaaaaaaccgccgaagcccgccctgtacatagcgggaagtaaagcggaggcgccgctgtaggaggactaagggataagacgcaaaggctgaacgctacgacaagatgattaacgaacgggcaggacgaaccaatgctcaagcgctgtacgcaccggtctttttcaagggaagagctatccgtgatggaagctgtataaaaaacgaggaggaatgaaaaaatggcaaatcatatttatcttgccggcgattcgactgttcaaacgtatggagacagcacaaatcaagggggctgggggcagtttctcggctcgcatctgccggagcatattcaagtgatcaacagagcgatcgggggaagaagctcgaaaacatttgtggaagagggcaggcttcaggcaatcctcgatgtgattgagccggatgattggctgttcgtgcagatgggccataatgacgcgtcaaaaaataagccggagcgctacaccgagccctatactacttataaacaatatttaaagcagtatatcgcaggcgcgcgggaaaaaggcgcccatccgcttctcattacccccgtagcccgctttcattacgaaaacggcgtgtttttgaacgattttcctgattactgcattgccatgaagcagacggctgaagaggagaatgtccagctcattgatctgatggagaaaagtctcgctttctttactgagaagggcgaggaaaaagtgtacacctattttatgatttcagaagggattaacgattacacgcattttacaaaaaaaggcgcaaatgaaatggcgaaacttgtggcaaaaggcataaaggagctcggcctgccattgacagaatcgatcatcaaagaaaggtgaaaatgggatgagaaaactgtatcatggcgcttgctattatccggaattatgggatgaagagacgattcagcaggacattgacatcatgcgtgaagttggcgtaaatgttgtgcggatcggcgaatttgcctggtctgtcatggaacctgaagaaggaaaaattgacgtcggttttttcaaagaaatcatcgcccggctgtatgatagcgggatcgaaacgattatgtgcacgccgacgcctaccccgccgatttggttctcacatggccggcccgaacgcatgcatgccaatgaaaaaagagagatcatggggcatggctcccgtcagcatgcctgtacgaacaacccgtatttccgaaaaaaagccgccatcatcaccacagccatcgccaaggagcttggccggctcccggggctgatcggatggcagctagacaatgagtttaaatgccatgttgcagaatgcatgtgtgagacatgcttgcgcctatggcatgactggctcaaaaatcgctacggggtaattgagcgcttgaatgaagcttggggaaccgatgtgtggagcgagacctatcagacgtttgagcaagtcccgcagccgggaccggccccgtttctgcatcatgcctctctacgcactatgtatcagctgttttcgatggagatgatcgcttcgtttgcggatgaacaggccaaaatcatccgctgctattcagatgcgccgatcacgcataacggatcagtcatgttcagcgtggacaatgagcgaatgtttcagaatctggattttgcctcctatgacacgtacgcttcgcaggaaaacgcctctgcctttttattgaactgtgatttatggagaaatctgaaacaagggcgcccgttttggattttggaaacgagtccgtcgtatgccgcctcgcttgaaagctccgcttacccgcacgcagacgggtatttgcaggccgaagccgtatcgtcctacgccttagggagccaggggttttgctactggctatggcgacagcaacgttcaggcagcgagatttcccacggttcggttctcagtgcctggggcgaacccaccatcggctatcaaaaggtgctggcggttgagcgggcaagaaaggaaatcgagcctattattctatcgactgaacccgttcaagccgaggcggcgatgacttactctgacagagcaaaagcatttattaaaactgagcctcaccggggactccggcatcgttcgcttgtgacgcatttttatgaacgtattctcaacacggggattcaccgtgaccttattccggaaggcgctccactggacggctatcgcttgctgtttacgccatttgtgccgtatttgtcttctgaatttatcaaaaaagcttcggcattcgctgaagcgggcggcatctggatcaccgggccgctgacaggagggcgcacatgcgagcataccattcataccgattgcggacttggcgaacttgagaaaacgtcagggatcaaaacactttttacctttccgatgaatgagaacgtgaatacaggaaaagcgtttggcatcacggcgccactcggactatggagcgcggtgtttgacacagagagcggaaacacccttggcacggttgaatcaggaccgggggcgggccatgcttttctgacggaacagaattacggcgaggggaaaattgtcatgctgggatcgcttccatccgggaaagaaggggatgcgatgctggaagcgctcgtcaggcattatgcggaggaagctgttatttccagccggtcggatgtgacgcccggcacgatcgttgccccgcgcaaaggcgaaaacggccttgtgtggatcgttgtgaatatggatggaaaaggaggaagtgtgacactgccggaagcgggaacagatctgttgacgcaccgcttggaaaaggcggggaggctggcggtcggaccgcatgaataccgtgtgattcaatttgacaatcacagctgattctttgcatcgaatcagcttttttctatggagggagagaccgatgaaaaagatcaaatggttatcaggacagccaaaggtgataagtggtgtgacgtggggcgtgccatggaaaaaaggagaattaaaaaagggtgaccgtctggcgcttatgaatgaaaacgcggaaatgcgatatgtgcaaagcgaaccgttggcctattggccggatgggagcatcaagtggacgaagcacgcggcggtgtttggtggtcagagaaaccaaatatttacagttcgcaaaagagaagtgccgcagccaactgaatcgctcagcattcatgagacagagcatgatatccaagtgaatacaggagcactcgtttgtaccattcataaaaaaggatctgatttcattcaatcattgcagatcaatggaaagccgatcgccgcaggcgggaggctcgttgcgataagagaaacgagaaaggagtcggcggcggaaacggttcttttgcatgaaaggtctgtcagctttatcaaacgggcggcgattgagcagagtggtcctgtcaaagcagtagtcaaaatcgagggagtgcatgtgctccataaaacgtatgaggaatggctgccgtttgtcatccgattaacgttttatgccgggctgtctgagatcggccttgtgcacacgcagctgattgacaggagcggtaaacaagaattcataaaggggctcggcatcgaattcgacctttttttggagggagagccgtacaaccgccatttccgctttgcgggagagaaagggatgtacaaagaacccgcccagctgtttggcacacgtaaattcaatgaacgatatccgctttatgaaaaacaaatcaatggcgaaatgctgtctccagatgaagagcataaggaatggtttgcacatggcacacagaatgtggtttgggacgatgtcaagcttgtgcaagattccagcgatcattacagcctgtcaaaacggaccggaaaagattatgcgtgggttggaatgctgcatggcagccgggcgaaggggctctgctatgcgggcggaaaaaatggcggtgtggctctcggcctgcggtatttctttgagaaatatccttcagcactggaaatcacaggtcttgccggcagccgccccaaaatgactatctggctttggcctccggacggcgaagcgatggatttgcggcattatacaggaaacacccacgtggccagcgcgtatgaaggatttgatgaaatgcgctctgatccgacaggcattgcgaacacaaatgaaatcagcctggcgtgcttttcgcacatgccgtctgacgaagtccttaatgcactcgctgacaaatggcaggcgccgccgctcttgatatgtgagccaaacgtctattacgaatcaaaagcgctcggggtttggagcatcattgacacatcccatccgctcaaaaaagagctggaggaacagcttgacgccgcctttctgttttataaaaaggaagtagagcagcgcaaatggtacggtttttggcattatggcgatgtcatgcatacgtatgacccgatccggcatatgtggcggtacgatctcggcggatacgcatggcaaaacaatgagctcgttccgaccttatggctgtggcaggcgtttttccgctcaggcagagaggatatctttcgcatggcagaagccatgacccgccatacgagcgaaacggacagctttcacctcggtgaatacgcaggacttggttcacggcataacgttgtgcactgggggtgcggctgcaaggaagcgagaatcagcatggccgggctttataaattctattattatctgacgggtgatgagcggacgggagatcttttgacagaagtgaaggatgccgattatgccctcgtcaaaaccgatccgatgcgcgctttttacgagaaaggcaagcacccgactcacgccagaacgggaccggactgggcggcgttttgctcgaattggctggcggaatgggagcggaccgaaaatccggaatatctccacaaaatccaaacgggaatcaactgtctgaagcggctgccgctccgcttattatccggcccgacatttgaatatgacccggcgacctcgatgcttcatcacatgggagacggcattgcgggcggatatcatatgatcattgccttcggcgcgccgcaagtgtggatggagctggctgagcttcttgatgaccgggaatgggaggatatgctgagtgaattcggcgaattttacacactcagtgatgaggaaaaacgaaaaaaaagcggaggcgctcttcatgacgggcattttcactggccgatgttcgccgccagtatgacagcctacgccgcaagaaaaaaacaagatcctcatctcgccgccaaagcgtggaatcttttgctagaagataagctcagccatacgccgcttccgatcaaaccggagcgcatcgagacatggacgcagctagaggagcttccatgggtgacaacgaacactgtctctcaatggtgtttaaatgtcatagcggcgctggaactgatcggagattcccttccggcaaaaaaagaaacatcgggcaaaaaaggataacagccggaatttcataggagaaatggtgcaaaaaatgaagattgcaagaatttatgtaagcgctttatattgagaggggcaaaggggaaatgcaaattgaaaaaagggggacttacgcaacatgaaaataagaatgcgaaagaaatggatggccttgccgcttgctgccatgatgatcgccggatgcagccattcggaaacatccaattcagcaagcggttcgaaagatacgatcaaaattatggcgccgcttttatcgccggaaagcccgagtgataagagcccttcattaaaagcactcgaaaaatacacaggcaaagagattaaggtcacatgggtgcctgattcatcctacaacgacaaattcaacatcgtcatggcttcaggagagatgcctcacgcgattgtcattaaagataagtcagccggctttatcaaatctgtcaaagcaggggcgttttgggagctgtctccttatttaaaagactacaagaatttaagccaggcagatgaaaagattttgaagaacagctcggtgaacggcgaggtgtacggaatctacagaacgagggatctgatcagggcgtgtatgatcatcagaaccgactggctgaaaaatgtcggtctgaatatgccggaaacgcttgatgatttctatgaagtgctgaaagcctttaaggaaaaagatcctgacggaaacggcaaggatgatacgtacggcatggtcgtgccgaaatggatgggactcggcaacggaagcccatgggatgttctgcaaatctggttcggcgctccgaaccgctacggtgttgaaaacggaaagctgattccggattttacaacgaaggaatacatggatgcgctcacgttttttaaaaagctctatgatgagggattgatcaataaggactttgctgtcatggattctgcgaagtggaatgatccggttgtaaaaggaaaagcgggtgtcatcgttgatacaggctcaagagcgtctcaaatccaaagcgcgatggaggaggcggatgagtcgaacaaggatatcattgatatcgtcggctcgcttgagggaccgaatggcaagcgcaccttcccgacatctggttattcaggcatgatcgcgataccaaaatcaagcgtcaaaaccgaaaaagagctgaaagaggtgctgtccttcctcgataagatgaatgataaggaagcgcagattctcacgaacaacggagtgaagggccgcaattacgagctcaaggacggcgtattcacctcacttgaaaaaaacaacaaatctctcctgtatgagcatgaaggcttggcacagttcagcatgtcgattccaaaaagcgagtattacatcgaagaccagaaaaccaagctcttccagcatcgcaaggacatcataaccgaaggagaaaaaatagccgtctttaacccggctgagtcgcttgtatctgatgtctatacccaaaaaggagcccagcttgacaacatcatcctcgacgcgagaacacaatttatcattggagaaattgatgaaaaagggttcgatgatgcggtggagctttggaaaaaaagcggcggcaatgaactgatgaaggacttgaacaaattgtaccaatcgtcaaaataaaccgatgcgcctgccgttcggcgggcgccccggtatcacgaaaggagaacagatatggaaacagtgccgaagaagggagatgcacctgttctcaccgctggaaaaggcatcagctggatggctgcgctcaaacgggacaaatggctttatcttcttcttattcccggtctgctttatttcttgattttcaaatacttgccgatgtggggtgtgctgatcgcttttaaagactattcgccatatctcggcttctggaaaagcgaatgggtcggctttgattatttcaaagacttttttatgaatccggattttttccggctgctgcgcaacaccctcatgctggcgagtctggatcttttgtttgcctttcccgcgcctctcattttggccctgcttttgaatgaggtaagaaaggctgtgtataaaagatgtatccaaacctttatttacgtaccccattttgtatcatggacaattgtggtcagcatcaccttcgttttttttactgtcgatacaggtgtgatcaacaaaatgatcatgagcctgacaggtgagcagatttctttcttgtcggatgcagactggttccggccgatgattgtgatgcaaagcatttggaaagagacaggctggggaacgattctatttttggcagcgcttgctacggttgatcaagagcagtatgaagcggccatcatggacggagcggggcggttcaggagaatgtggcatattacgctgccggcgataagaagcaccattatcgttttgttgattttaagaatcggcagctttttgaatcttggctttgaacaggtgtatttgatgacgaactcactcaaccgcagtgtggctgacatcttcgacacgtatgtgtacatgatggggattacccaaggggcgtatagctacagcacggcggtcggtttgtttaaatcagttgtcgggattatcttgatttttggcgccaattacattgcgaaaaagtttgatcaggaaggattgttttagaggagggagaggtatggctgaaattcacacgatgcacaacaccaaagccggacgggtgtttgacgtctgcaacattctgtttctcggcggtgtcggcgcgattaccattttgccgtttttatatattatcgccggttcctttgcgacagaagcggaacttgcccagcggagcttctttattttcccgaaaacctttacacttgatgcttacaagtatgtgttttcgacaccgacgttccttcgaagcatgggcgtgtccatcttcatcacggtggttgggacggctgtacagctatttttcaccttcacgatggcgtatccgctggcgaagcggcatgtgaagggacggaatctgctgttgaatctggtgattttctccatgctgttttcaggcggcatgattccgacgtaccttgtcgtaaaatcacttggccttttggatacgtattgggcattgattctgccgatggcgattaatccgttcaaccttattattatcaaaaacttctttcagcagctgccgcgcgagctggaggaatcagcaaaaattgacggctgttccgaaatcggcgtcttctggcggatcgccctgccactgtcaaagccggttatagcgacctttgcgctgttttatgcggtcgggatttggaatgatttcttccacgctctcttatatatcaatgacagtgcaaaatggccgctgcaaatggtgcttcgccaagtcacgattttatcggatttaacggcgaccaatggcgatacgatgcaaaatgccgttccgccggagcagggaattaaactcgctgtcattgtcattgcaacgctgccgattttggcggtctatccatttttacaaaaacactttgcaaagtggatgctgatcggttcggtgaaaggctgagaaagggagtgtttcatatcagtacattagatcggattaagattgcctatatcggcggggggtcccaaggctgggccagaagcctgatgagtgatttgtcgattgatgaacggatgtcaggcacggtggcgctctatgatcttgattttgaagccgctcagaaaaatgaagtgatcggcaatcacagcgggaacggcagatggagatatgaggctgtttctactttgaaaaaggcgttatcagccgcggatatcgtcattatttccattttgccgggatcactggatgatatggaagtcgatgtccacttgcctgagcgctgcggtatttatcagtctgtaggtgatactgtcgggcctggagggatcatcaggggcttgcgtgctgtgccgatatttgcggaaattgcccgggcaataagagactacgcacctgaatcatgggtcattaattatacaaacccgatgtctgtctgtacaagagtgctgtataaagtgtttcccggcatcaaagcgattggctgctgccacgaggtattcgggacgcaaaagttattggcggaaatggtcacggaaaggctggggattgaggtgccgcggcgtgaggatatccgcgttaatgtgctcggcattaaccattttacatggatcacaaaagcctcttaccgccatattgacctgctgcctatattccgtgaattcagcgcgcactatggggaatcaggaggatatgagctggagggggaaagctggagggacagcgtcttttgttcggcacaccgtgttgcgtttgatttatttgaaacgtatggcgccatccctgctgcgggagacaggcatctggcagagtttcttcccggcccatacctcaaacagcctgaagtatggaaatttcatctcacacctatatcattcagaaaacaagacagagctgagaaacgacaagaaacagaacggttgatcgtgcaacaacgaggcgttgctgagaaagcttcgggagaagaaggcgtgaatatcatagtggctcttctcggattgggtgaactcgtcacaaatgtaaatatgccgaatcaaggccaggtctcaaaccttcctatacaagccattgtcgaaacaaacgcattcatcacaaggaaccgtgtccagccgattttgtccggagcgcttccgaaaggtgtggaaatgctggcggctaggcatatatccaatcaggaggcagtggcggaagcaggtttaacaaaggacactggcctcgcgtttcaagccttcctcaatgacccgcttgtcaagattgaccgcagtgatgcagagcagcttttcaatgacatgctccaatgcatcatgcaacgttgagcggagtttttccggtttagaaaggaaagcattgaccatactgatagtattatcaagaagtaggtgctatcaatatgggaaattatttaagcgttgcggtagaactggtctgcggtttaggcattttatttatcatcttaaagcttctcgggaaaacccaattttctcaaattacgccgtttgactttatctctgctttaattttaggagaattagtcggaaatgccgtttacgatcatgaaatcaaaatcaaagaaattatttttgcttcgctattgtggggcgtgctgatttatattattgaatttatcacgcaaaaaatgaaatcatcgcgaaagttcttggagggcgagccgaatatcgtcatccgcaaaggggagcttcaatataaagtattgaagaaaaataagatggacattaaccagctgcaaagccttttgaggcaagcggggagcttttcgattcaagaagtagaatatgcgattttggaaacaaacgggatggtcagtgtgcttccaaaatccgactttgacaaaccgaccaataaggatttgcaggttccttcgaagtctgtttccctgccaatcacgttaatcatagatggagagcttgtccgggataatctgaaggaagcaggtgtggatgaacagtggctgaagcaagaattgaaaaagaagaacattgataagacggaggacgtgttatttgcagaatggcataaaaataagccgctgtataccgtaacatacgaacaaagcagatcaacatgactcttagaaaaaagcttgcagcaaggcgcaagctttttattgattgtatgtcccttgtttgacagcacgtacatggtacatgctcacttcagtgctgatcagatagtcaggctttggtttgcctttgtttgctttgtggccggcgatatgcgcatcgcttttttcccattgcttccagcgatcctctgattcccagcgaatcatgacaacaacttcctcatcaccgcggcgtacgtttttctcaagcactgtcacatcaattaaaccttcttgtttttcaatgattccttcagcgctgaaacgttctatgactttatctgcaaagccttcttttaccgtcatttttctcaactgaacaaacattcgtctcactccaatcattctcacatatgaataattgtaaatgaaattcattctcattgtcaaagaaagcgcagggcggaatcgaaccgccgtgcgcaacagtttattcttttaataaaaacacatttccgtcttcgtccttaaattgaacgaaggtgccccactccatttgattgggctcaccgagaaattctacaccgtttgtcttcattttctcgtatgtaccaaagatgtcttcgcattcaaacacaatagaagccttcatttgctctgagcctttcatcatggctttcgggtaaatgactaaacgagtctcggctccttttggcgcaacctccagccagcttgcttcaggtcccattgggtggtccgctgcaatatcaaagcctaccttctctgtccaaaattgcttcgctttctgctggtcctcgacatatacagcaacagtgccaatttgtttgatcatagggaaacctccaagttgaaaagataataatactataacctgtttacggccgaagtaacataaaaaaatcagccgggaaaccggctgatttttaaaatgagcagctgacaacatcgatgtgatttgtgtctaaggcgaaataaacccagcggcgccgtgaggaatcccaataaaagccgccgacggatcttctgccaaggatgatcgggtaaaaccaaaatgagcggccattggttaaccaaacataggtaaatcggaaaaggcaaggacgaatggtgattggttcaactaacaaaacggctccttgagaaccctgcggttttgggggtttcgctggtatttgggaaggaggaggtccctgcggcgcaccgccgaagcctgggctggcaccgctgccaataccagggccggagccgccgccaaaacctggaacagcgccaccgccaataccagggccggagccgccgccagagcccggaacagcaccgctgccaatgccaggccatggatatcggtattcatattcaaaagcaggccaaggctcataaaaatgccccgcaaacatataaggatcaacataatacatgtgataacgtcctttctcattgtaaactgtacactgcagtttatgcgggcggactcttattggtgcattcgcctaaggatatgaagctggaatgctctcaaagagcagaatcatttgatttttctctagtcttattcacaattccgatttatcattttataatgaaagtgcttctattacgaaaaaggagacagaccgtgaatatcgatcaattattatatcaatatatcatagacaacactgcggatattactgagaaatggttcagtttgcgttgccagctaaaaggcgagctatattccgccagccatttaagtgaagaaacgaaaacacttttaaccgagcagcatacatttaccaatataacaatcgcaagcgcatttctggaggatcaaaccgattttcaagacaacatgacaaaatgggcggaaaacgttgcgaaaaacagggtagagcaggatgttcaagttcatgaggtcgtagaagccatatccaactctagaatctcattctgggacgcagtcgccacatttataaaagagaatcaggagatcgtgacaaatgaggatgcagaccgatggaaccgcattgtgaatcagtcgttcgataagctgattattgaattctctgagcagtaccaaaaattcatgctgatgaggctcacatctcagcaggaactgatctcagagcttggctgcccggtcatttccattgccgatggaatcgggatattgccgcttatcggctccattgatacaaaacgggcacaggtcattttagaaacagtgccggtccgctgtgtcgagagaaaaatcacaagcctcgtcgttgatctttcgggtgttccgattgtggataccatggtggctcagcaattgtacaacctgtctaaaacgcttttcttattaggcgtcaaagccgtattttcagggattcgcccggatgtggcccaaacatcgattcaattggggcttgattttagtgaatatgaaacgtacggcacgctgaagcaggcattagaaaatatgggtgtccgctgtattgttgaggaattggaagaaaacaaataggaagtttccaggcatatgattgtccgtcaccgggtgatcatatgcctttttgatttgaacagaaatcaccattgatttatcaaaaaaaacataatattataattcttataagaatactgtgaattaaaacctattcaacagggggaaggtcttttggtttcaaaatcaacgattgatccggaagtgattgaaaaaatcatcagctcgctggaaacactcgatttcggcaccgttcaaattacggttcatgattctcagattacccaaattgagaaaatagaaaagcaccgtttttcgctgaaaaggaaagaatcaaaatgataatgtaaagggcgtttgttttcattaaattctccttaaaacatatacatatttcatccaatttttatataatagacctttaagatcattttttaggaggatttttgacatgcaagctacggttcacgagagtaagcaatcgatcatgcaacgcattttgacagtctttgtctttactttgctgatcgcgactgtcggcctttttatcggccaatttgttcctgtcgctttgatgctgccgctttctattcttgaagtggtgatgattattctggccttctggatgcgcagaagaaaagcggtcgggtatgcgtttgtatatacattcgcgttcgtttccggcattaccttatttccgatcgtcagccattacgcttccatcgccggcgcctatgtcgtgcttgaagcctttggttctacatttgtcatttttgccgtcttaggcacaatcggcgcaaaaatgaagaaggatttatccttcctgtggtcatttctgctggttgcggtgctcgccctcgcagtggtagggattttcaacattttcagcccgttaaactcagcggcgatgatggcgtattccgtgatcggaaccatcgtcttttccctttacattttgtatgatttgaaccaaatcaagcaccgccacattacggaagacttgattccggttatggcgttatcgctgtacctagactttatcaacttgttcatcaacctgctccgcttcttcggcattttgagcagtgatgattaatgaaaaagcgtctgtcattggataggcgctttttgccatacatcaaaaaggcaggtggagtattggtgaaaaaacaaatgggcgcatatgtatctctggcagcagctatggcgatcgtcggcagttctgtcgttgtcggcaagctgatggtcgaacggattccggtctttctttcctcaggattgcgttttttgatcgcttctgtcgtattgctcatgctgctgttttgcattgaaaaagggtttccggctttgacgaaaaaagatgtgttcgtattactggtgcaatcattcacaggcgtgtttttgttcagtatttgcctgctgtatggggttcaatatacgacgggaacggaaagcggcattttgacaagcacaacccccatggtgatcggtattttatcctttttcctgcttagagaaaaaattgagaaaaagacgctgatcggcattttgctggcggtttgcggcgtaatggcgattaatttgtttggagccgggagccaagacgggacgccgcacgccttattcgggaacatgctgatcattgctgcagtcattggcgaagcgttgtttacattgatggccaagctgctatccccgcatatttcggcactggcgatttcgaccttcgtatcgctcttcggcttcctgttttttctcccgtttgctttgtttgaggcctcttcatttgattacagcgtgccgactgttttggattggtcgtatgtgctgtattacgcgctttttgtcactgttttggcgttttacttatggtatagcggggtgacgaaggtgccggcgggtgtatcgggcattttcacatccgttcttccggtctccgctgtcattttgtcaggcgtgatattgaaggagccatttgagtttgtgcatttcatcggcattgcatgtgtcatcggcggcatatttgttacggtcataaagaaaaaacagccggatgcgtatccggctgcagaagaaaagacgctatagcctgtccggatcggacgggttttttagtctttaaacacgctcagcctttcaaaaagatcaccaagcatcttcacgaacatgtctttttcctcgtcgctgtagttttccatgacagcggatattttgctgaaatggccgggcagaaattgctccaggcgtgctttgccttctgttgtcagttcaatgctgatttttcgtttatcctctgtgtgatgcctgcggctgacaaaaccgtctctcgccagcccgtccagcaggcctgtaatcgtcgctttcgtgacgtttgactgtttggcaagctctgtcggacttaacctatgatccttggcatcaaagagcagcatcagtattttgaattttccttctgacagccctcggccagcaaagtaatgctccatcacatgattcattttttttgaaatatcaaaaagagataaaaacaattcaagagagccggcgtcaatattggaatacgtttcggcgtgctctgttatatgcttatatttcggtaaatgttttaattccatcgcaagtagctcccgtacattcgttgtgacacgattataaaggagggaaaaccataacgcaacttggcttggagatgattgacagcttttcttgggacatagtaaggtaatatagttaggcgcctaactaatacatatagagctgaaaaggtggttattgatatgaaacatatgttaattgcaggaggcggcatcggcggcttgtcagcggccatttctctccgtaaggcagggttttccgtcaccttatgtgaagcggcttcagaaaaccgaaaaacaggtgcggggattcttcagccgcaaaacgcactggcggtgttgaaagaactgggcgtattcgaagagtgctgtaagcacggctttcaaacagaatggtttaaaacgtttgatgaacaggggaatttgctgtttcaagtcagtgaatcctttttagacgattcacttccgggacgcaataatatcctgcgcaaaacgttaaatgacattctcatgaagcatgccgaggcagtgggtgtagacatcaagtgggggaaaaaggttgtcgcttatcaagaaacagctgaatcggtcactgccgtatgtgaagatggagaaaaaatgcaggctgccattctggcgggctttgacggcattcactccgttgttcgcgatataatgctgcaaaaggagacggaaaaagagcatctcggcatgggagcgtggcgcttttatatcgaacttcctgatcacacatttgaggacgcgacattgatgtacagaagcggagacacacaaatcggggtggtgccattggcacaacacgctggctatgtcttcgtcctccagccttgcacgagcgattactgggatgaggaagatacccggtttgatagagtaaaagagattctttctggttttcgggggctggattttgtcacaaagcacatgtcaaaacagcatcctgtcatctttaacaaactggagcaggtcgccgtgcaggagccatggcataaaggccgcgttgtcatcggaggagacgccgcccacgccggcgcgccgaccctggcgcaaggagcggcaatggcgatcgaggatgccatcgtcctcgccgaagaactccaaaaccacgccgatcacgaaacagcattacaggcgtactacaaaagaagagccccacgagcgctcaaagtccagaacctatcatcggaaatcgtccgccgcgggctgaaaggagagccgggagcggaagaactgattggggagtgctatgcggtgttgagggaagggtattaaataggaaaagtccagaaagtgatttctggactttttagtcttgctctgttttattccttatccgctcaatcacctcatgcagcccctcaggcttataaaactccaccggtgaactgcctttctcaaacgaaatcgtctcggcttcaatcagcgcgacatagcgcccgtttacttttgcgagatgaatagaatcgccaaaatccgctagcaatcccttaatctctgtttctccgactttcattttcagctgggcctctggcgtgtgctcgatgatttgggcggaggcttcgatgacttgatgggtgtcgaggcgctcttggatttcccgtttttcgcttgcttcccaaatctcaatgtcgtgctcgaactgcttgagttcttcgctgttgtcttcaaatgtctcgtagacgtgctcctgtaccatgttcatgacctggtttttcatgatttccggcatcgattctccgtactcgacgaatttcagaaagtcctcaaaatagcgggcgtgcgaggcctggtggattttcagttcaccttcctcgaccattccttcctctggcatgtacgggtattggatgcttttcatgttttttgtcgtgatcgccatttcgacttttttaatgagagaagacgcgtcagagatgcgggcgaccttcggctcaaaatcacatttcataatgaagacaaatgactcgtcaaagtattttctcggcacggccgaagcgacgagaaacacgccgccgcgaaccgcgcttgtgtcaaggtacgtgcggacgaactgctcgctcagctcattgaagtcttcttttgtttccgccagacgcgcgcggttgaacatgttgtagtttgggttggaatcgagctcgtggccgggctcgacgataaaatggccgattttcgtcggcacctgctcggactgcggatggcggtctgctttccgtttaacgatttttttcagttccccgtcgagaaagtccttcagctcgctttcttcaaattcgcccgtatcaagggtctggaagtgcttgaactgcttgttcgcctgctcatctttgccttccacctgtatgacataaaaggataaaaaccgaatttcaaaatccatatataaactcaccttattcgcgtattgtacagcttctcaagtatagaaaaaacagcgatcatgcgtcaattgggagaacggaataatcatgaccatgaaagggaaatgtagtcaaatagaaggcatctcatacggaaaggaatggttcgatgaaggaaacaagcccgattcctcagccgaagacgtttgggccgctcggcaatttgcctttaatcgataaagacaagccgacgctttcgctgatcaaactggcggaagaacagggcccgatttttcaaatccatacacccgcgggcacgaccattgtagtgtccggccacgaattggtgaaagaggtttgtgatgaagaacggtttgataaaagcattgaaggcgccttggaaaaggtccgcgcgttttccggtgacggattgtttacgagctggacgcatgagcctaactggagaaaagcgcacaacattctgatgccgactttcagccagcgggccatgaaggactatcatgagaaaatggtcgatatcgctgttcagctcattcaaaaatgggcaaggctcaatccgaatgaagcagtcgatgtcccgggagatatgacccggctgacgctcgacaccattgggctatgcgggtttaactaccgctttaacagttactacagagaaacgccccacccgtttatcaacagcatggtgcgggcgcttgatgaagcgatgcatcaaatgcagcggcttgatgttcaagataagcttatggtcagaacaaagcggcaattccgccatgatattcaaacgatgttttcgttagtcgacagcattattgcagagcgcagggcgaatggagaccaggatgaaaaggatttgctcgcccgcatgctgaatgtggaagatccggaaacgggtgaaaagctcgacgacgaaaatatccgctttcaaatcattacgtttttgattgccggccatgaaacaacgagcggcctgctttcctttgcgacttactttttattgaagcatcctgacaaactgaaaaaggcgtatgaagaggtcgatcgggtgctgacggatgcagcgccgacctataaacaagtgctggagcttacatacatacggatgattttaaatgaatcactgcgcttatggccgacagctccggctttcagcctttatccaaaagaagacacagtcattggcggaaaatttccgatcacgacgaatgacagaatttctgtgctgattccgcagcttcatcgtgatcgagacgcttggggaaaggacgcagaagaatttcggccggaacggtttgagcatcaggaccaagtgcctcatcatgcgtacaaaccattcgggaatggacaacgggcctgtatcggcatgcagtttgcccttcatgaagccacacttgtgctgggcatgattttaaaatatttcacgctgattgatcatgagaattatgagcttgatatcaaacaaaccttaacacttaagccgggcgattttcacatcagggttcaaagccgtcatcaggaagccattcatgcggacgttcaggcagttgaaaaagccgcgtctgatgagcaaaaggagaaaacggaagcaaagggcgcatcggtcatcggtcttaacaaccgcccgcttctcgtgctgtacggctcagataccggcaccgcagaaggcgtcgcccgggagcttgcggatactgccagtcttcacggcgtaaggacagagacggcacctctgaacgaccggattggaaagctgccgaaagagggagcggttgtcattgtgacctcgtcttataatggaaaaccgccaagcaatgccggacagttcgtgcagtggcttcaagaaatcaaaccgggtgagcttgagggcgtccattacgcggtatttggctgcggcgaccacaactgggcgagcacgtatcaatacgtgccgagattcattgatgagcagcttgcggagaaaggcgcgactcggttttctgcgcgcggggaaggtgatgtcagcggtgattttgaagggcagcttgacgagtggaaaaaaagcatgtgggcggacgccattaaggcattcggactggagttgaatgaaaacgccgataaggaacgaagcacgctaagccttcagtttgtcagagggctgggcgagtctccgctcgctagatcgtacgaagcctctcacgcatccattgccgaaaatcgtgaactccagtccgcagacagcgatcgaagcactcgccatatcgaaattgcattgccgccggatgttgaatatcaagagggcgaccatcttggcgtattgccaaaaaacagccaaaccaatgtcagccggattctccacagattcggtctgaagggaaccgatcaagtgacattgtctgcaagcggccacagtgcggggcatctgccattgggccgtcctgtcagcctgcatgatcttctcagctacagcgtcgaggtgcaggaagcagccacaagagcgcaaatacgtgaactggcggcatttacagtgtgtccgccgcataggcgcgaattagaagaactgtcagcagagggtgtttatcaggagcaaatattgaaaaaacgaatttccatgctggatctgcttgaaaagtacgaagcgtgcgacatgccgtttgaacgatttttagagcttttacgtccgttaaaaccgagatattattcaatttcaagctctccaagagtgaatccgcggctagcatcgatcacagtcggcgtcgtgcgcggccctgcgtggagcggccgtggcgaatacaggggcgtggcttcaaatgatttagctgagcgccaagccggtgatgatctcgtgatgtttgtacgcacaccagaatctcggtttcagcttccagaagaccctgaaacgccaatcattatggtcggacctggcacgggagtcgcgccatttcgcggtttccttcaagcccgcgatgttttaaagcgggaggggaaaacgctcggtgaggctcatctctattttggatgcagaaacgatcgtgattttatataccgcgatgagcttgagcagtttgaaaaagacggaatcgtcactgtccacacagccttttcccgcaaagaaggcatgccgaaaacgtatgtccagcatgtcatggctgaccatgcagaaacgttaatatcgatccttgaccgcggaggcaggctttatgtatgcggtgacggcagcaaaatggccccggatgtggaggcggcactgcaaaaggcgtatcagtctgtccatggcaccggggagcaagaagcgcaaaactggctgagacatctgcaggataccggtatgtacgctaaggatgtctgggcagggatatagataaagaagactggagacatccagtctttcagcgtgtcggcaaaccctcgcattcgttgtcaggactgcgcttcggtgctcaatgcgaagtggatcaacggctaaattctcaggcgtcctgcctaaacgccgtcgtcatcacatcctgtgaatatccgctcctatgctcgtccttcctagacttcaagggttttcaatcacgctgaaaagatgacaaaatcctaaaatggttttcattttaggattttgtcaacaatctggaagactggagacatccagtcttttttgtcctttcgaaaaaatggtgatcgcgctaaacattgatgcatacaataacttcagtccgccggaagggcgggctgtctgcaaaacctatttttcgtttttgctagtttatgttattcttatactcggtatctatttcttttttcaaaggcacacatgacaaaagaaatcctttttttatttcggagaaaaaaatgtgaaacgaaatgaaggtttctttcgtccagtgattggtttccaaatggttgtaataaaaatgatatggtgcgtaacataaatattccggcttgccgcggtgtatttcttgttgtgtgatgccttgattttgtttggaaagaaggaattggaaggcaggatataaagagcaggtaaatatgaatgaagaacttaaagtgtttaagaaagtagaggttgccatgaagaaacttttttcttacaaacttagcttttttgtgctggctgttatactgttttgggcaaaaacgtatttatcctacaagactgagtttaatcttggggtaaaaggcacaactcaggagatcctcctgatatttaacccattctcaagcgccgtcttctttttaggactggctttgctggcgaaagggcgtaaatcagccattattatgctgattatcgatttcttgatgacatttgtgttatatgcaaatattttattctatcgtttctttgacgatttcttgacgttcccgaacattaaacagtctggaaacgttggaaacatgggagacgggattttcagtatcatggccggtcatgatattttctatttcttagatattatcattttgattgcggtattgatctggagacctgaattaaaagaatacaaaatgaaaaaacgctttgcatctttagtgatcctttctgggatcgcactgtttttcatcaacctgcactatgcggaaaaagaccgtccgcagctgctgacaagaacgtttgaccgcaattatattgtgaaatatttaggtttatacaactacaccatttatgacggtgtacagacggctcaaacagaaacgcaacgggcctatgcaagcagcgatgatttaacaagcgtcgagaattacacgacgtctcattatgcgaaaccgaacgccgagtacttcggctctgccaaaggcaaaaatatcattaaaattcacctcgaaagcttccagtcattcctgattgactacaagctaaacggtgaagaggtgacgcctttcttaaataagcttgcgcacggcggggaagatgtgacgtattttgataacttcttccatcagacaggccagggaaaaacatctgatgccgagctgacaatggataactcgatcttcggtcttcctgaaggctccgcgtttgtgacgaaaggcgaaaacacctaccagtcgcttcctgcgattttagaccagaaggaaggctatacaagcgccgtcctgcatggtgattacaaatcgttctggaaccgtgaccagatttacaaacatatcggatacgacaagttctttgacgcaagcacgtacgatatgtcggatgaaaatgtgattaacatgggacttaaggataagccgttctttactgaatcgattccaaagcttgaatctcttaaacagccgttttacgcgcatttgattacattgacaaaccattatccgtttaacttagatgaaaaagacgcgtctcttaaaaaagcgacaactggcgataacacagttgacagctacttccagacagcgcgttaccttgacgaagcgcttgagcaattcttcaaggagctgaaggaagccggcctgtatgacaactcagtcatcatgatttacggtgaccataacggtatttctgaaaaccataaccgagcgatgaaagagattcttggaaaagagatcacagattatcaaaacgcacagaaccagcgtgtgccgctgatgatccgcgttcctggcaaaaaaggcggagtgaaccatacgtatggcggcgaaattgacgtcatgccgacacttctgcacttagaaggaattgattctcagaaatacatcaactttggtactgacttattctctaaagaccacgacgatacagtggcattcagaaacggagacttcgtaacgccgaagtacacatcagtcgacaatatcatttacgatacgaagacaggtgaaaaactgaaagcgaatgaagaaacgaagaatctgaaaacaagagtgaaccagcagctgagcctttcagacagtgtcctgtacaaagacttgctgaggttccataaactaaatgatttcaaagctgttgatccgtcagactatcattacggcaaggaaaaagaaatcaaataagatgaaaaagagccttgagcgggcgcattgccttcgctcaaggctctttttttggttatacaaccaacttgaaaaaatagattccatttggtcaccaaggctggctttctctcatatcattacagtagattttgaaaccggattgaaatcggacaaattatcggggaaatgccttgatagattgtgaagatgtaccaggtttcgaactcaatattcatagagatgaggggtagagatgaaagcggtcattctctgcggcggaaaaggaacgagaatgagtgaagtcacgaatgacattcctaaaccgctcgccatgataggcggcaaaccgattctatggcatattatgaaaatttatcagtactacggagtaaacgagtttattctgcttttgggctataaaggagaaaaaatcaaggaatactttctcgactatgaatggaagcacaacagcctgacactcgacagctctacgggagaggtacagatgctgggacagcctgaaacgtggaaaattacgtttttggagactggggaagatacgctgacagccggaagaatcttgcaggcgaaagactatatcggtgatgaaacatttctgcttacctatggggacgggctggccaatatcaatcttttccatctcatcagctatcatcagacaaaaggtgctgccgcgactgtcaccggcattgacaaagtctcgcagtttggcaccttgacggttgaggacggcatggcgaaaacattttctgagaagacatcaagtgacggaatcatcaacggcggattcttcgttctcagtccaaaggttttcgagtatttgccgaaggacgggaacgcgatgttcgaagatgaaccgctgaagaaccttgccaaagacggggagcttgctgtgtaccgccattacggattttggacggccatcgatacgtataaaaatctcttagaagtcaacaaaatgtggaatcaaggacaacaagtatggaaggtatggtgaatcgatttgagtttctggaaaaataaaaacgtatttgtcacgggatccacaggtcttttaggaagctatttggtgaaagagctgatcgatcagggcgcaaacgttacggggcttgtcagggatcatgtgcctcaatccaatctttatcagggagaacatatcaagaaaatgaatatcgtgcggggctctcttgaggacttggctgtgattgaacgcgcgcttggcgagtatgagatcgacactgtctttcatctcgctgcacaagcgattgtcggcgtagcaaaccgcaacccgatttctacctttgaagcgaatatcctcggcacctggaatattctcgaagcctgccgcaagcatccgttaattaagcgggtcattgtcgcttcaagtgataaagcttacggcgatcaagaaaaccttccatacgatgaaaacatgccgctgcaaggcaagcacccgtacgacgtctcaaaaagctgcgcagatctgatcagccacacctattttcacacgtacgggcttccggtctgcattacgcgctgcggaaacttatacggcggcggagatttgaacttcaaccgcatcattcctcagacgattcagcttgtgctgaacggggaagcgccggaaatccgaagcgacggcacatttgtacgggactacttctatattgaagacgccgttcaggcttatctgcttcttgcagaaaaaatggaagaaaacaatcttgccggagaggcctttaacttcagcaatgagatccagctgaccgtacttgaactggtagagaaaatattaaagaaaatgaacagtaatctgaaacctaaggtgctgaatcagggaagcaatgaaatcaaacatcaatatttatccgcggaaaaagcaagaaagctgctgaattggacaccggcctacactattgatgagggacttgaaaaaacgattgagtggtatacggaattcttcaaaaagtaatgtgaaacgaggtgaacaagactgtgaccagcgcgtattgcaccgttttatcaaaaggaagattatatcaggcagtcgctttgtttaagtcgttagagcaagttgatcaagacagtcccatttttatactttgcatggatgaagatacgcaccgcgtgttacagaagctgaagatgaagcagctgaaccttgtgccggtggccgctcttgaaaatgaattgctgctgaagctgaaggaaactagagatcaaagtgagtattgctggacgatgaagccgatctttctgcaagctgtgctgaacagcaatcccgagctggagcgcgtgacgtatattgacggggacctctttttctatgcagatccatcgccgatttttgaaaaccagccggactgctcggtgctgctttcacggggggatattgtaatcccttcttttgagaaagagcagattgacatgctgcagcgtcttttaggcagatataattccgggtttatcagcttcaagcatgatgatgcaggcacggattgcttggagtggtggaaggaacgctgtcttgaggaatgcaaaaatgcaccgggtgaagggaaattcggtgatcagggctatttggattatatgtctgagctgtttccgaatgtgtgtgacattacaacacccggcgtgaacatcggccattggaattatggacagcatacgttttcctggaaagatggccggatcgtgctggaggatggcagtccgctgatcttttatcatttcagcggataccgaatcgtcagcatcaatgaaatcaaacagattcatgaaacaacccgcacagatctgccgtttgtgcatgaactgtatcaagagacactgccgcatatcattcagcacatgaaaacgttagaccctgaatttaacggttttgcttcaaaagatgacaacaaataaatgagtaaatacaggaagtgaaaatgaagtgaaagcaagcgttattattcctgcatataattcaaaggagcgtctttacaacagccttctgtcattaaaccagcaggagtgcgatgaagaattcgaagtcattgtagcggacaatggctctgaggacgggacgctctcgatgcttgagtcatttcaagctgattttccgctgatctttacacggattaaagaaaacaggggcattgcgtacggacgaaatcaggcgcttcgcaatgccagaggagacatcctgattttccatgacagcgatatgcttgcggcaaaggaccttgtggcaaaacatattaaagcccatgagaacgaagagaatctcgtcgtgtgcgggttgttttggaaacggatctacagtttttactatgaacggtttgaagaagaacataaggaacagctcgcaaagctcacaggtgaaatgccgaagaaagacaaacaaaagctgctggaggaagcggacatcaaaaacggaagctttcttgataaaagctttgacctcgataccgactttatagacgtgctcaagaagattttagatgagtacggcgatgacttgaaaggctatcatatgccatggcgcttttttatcacgaataattcctctgtgaaacgcaagcatgtggttgacctcggtttatttgacgaaggcattgtgcggtacgggtttgaggattatgacctcgggatcaggcttcatcaggccggattgaccttcaggcttcgccgtgatattgtcagtgttcatcaggaacatccaagcaattgtaagtctgtagacgatattcgggcaaacattgcctatatgtgcgataaatacaataacatccgctccttagacgttcatctcgcttttaatgggccgttcccgcctgacatgacgaacagaatcatggctgatattcaaaagctgctggaatcacagaaatatgatatgctgctgaatctgtttcttgagcttctgcatgttgttaaagagcgcaacattgatccggattggcgaaagaaatccccaagggtgacggcgaaaagctttgatttacaaactgtccgcaagcttctgcctaaggcgaagaaaaagctaggcgtgaacgattttgccaacgcactgtatgcgcttgtcaacgatttgctgcacgtggatcttagatcattggatgtggtataagtgagtacatttcatttttcaacgatagtgtcaaggacacatatctttaagctcatgcctatgattcattctctccatgagcattgcgatgattttcatttatatgtgctgtgtgtcgaccagaaagcgtatgaattgcttcagcacgtgccatgggagcatgtaacctttgtgcagctgcatgaaatggaagacccggagctgctgaaagcgaaaagcaacagaacgtttcatgaatattgctggacgttaaagcccgcctttttgtttcatgtgatgagcaagtgggatgacgctgaatactttgcccatatggatacggatctatttttcttttctgatccggcacgtatttttgcagaaaacccaacggcgtctctgtatttgactgatcatcgtaattcgccgcgcttcatgtcctactacgaccgaaccggacgctttaatacaggctttgtcggcgccggtaatacaaaggaagcatatgaagcggtgtggcagtggagacaggactgtattgaattttgcacggtcgaaatggatacggaacgaaagacatatggtgatcaaagatatgtggagaaatggccggagcagtttaaaggtgttcatgttgtcaaatccataggagccaatacagcgctttggaatatcgaaaactataaggtcgggcaaaaggacggccgcgtgtatatagatgaaacgccgctgattttctatcatttctctgggtttacgctggtgacagaaaaagagtttaatctttgctggtactaccggattgaagacgaagcgacaattaagatgatttatatgccctatatattaaatctgaaaagatggattgatgaaatacagtcggcgtttccggactttgcggatggctttatcccgaagcacgcagtgcctgacactcattttatccagctggattaaaaaaccccctgccgcctggcaggggttttttcagctatgccattctctcagcttctggtcacttggcaataggaaggcaaggatgccgaggacagggagaaaggcaatggcgatcatcgtcggggtcagtcccgcggcatcaatcagagcgcccagcgccacagcgccgattgcgcccatcccgaaggcaagcccgacggttaaaccggacattgtgccgatttttccaggaactagctcctgtgcgtagacgaccgttacagaaaagctcgacatcagaaccaagccaatcaatgcgagcacgccgtaggcgagaaccgggccggcaaatggcagcacaatcgccagcggcgccgagcataacagcgaaccgaggataacgaagcgttttccaaaacggtctgcaagcgggccgccgagaaacgtgccgatcgcgccgaacagcaagaagacaaaaatatagctttgtgcctgctgaatgcttacgtgataggtatccatcgcgtaaaacgtgtaaaagttaccgatcgcactcgtataccaagaacgagcaaaaatgagaaatataataataataagagcagatacaacagatttggtgatggccgtgttttcagccgttttcttttgcttgcctgatttctgggcaaggctgccgagacgtgaggcgtaccatttcgcaatatacatgagaaacataacagcaagcgcggcgacaagcgtgaaccaaacagcgccgaattgcccgagcggcacaaggatcagcgcggtgatcagcggtgccatcgcctggcctgagtttccgcccacctgataaatcgattgggcgagcccgcgttttgtgccggcggccatatacgccacacgggagccctccggatggaaaatggccgagcctaatccaatgaaaaacacacagcataagatcgttatgaatgacggggcaaatgcaaggcccaaaatgccaagcatgctggcggtcaaaccgactggcagcgcatacggccgcggccgtttatcggtataccagccgacaacaggctgcatgacggatgacaccatgtttaatgtgaaagcaatgatgccgagctgtgtaaacgtcaggctcatggagcgttccaaaatagggaacatggccggaatcacagcctgaagcgaatcgttgagcatatggcaaattccgataataatcaaaatcggatacaccgtggtgcctggtttttgaactgttttttcttttaacggggcggcgatagccattgagtctcctccttacatatataaccaaagcataccaccatattattcataaggtgaagaatttatcaagaggaaaaaagattcttatgaaagaaataccgtcagcctgattagcagctgacggtattttcgatattcaaaatgtgatatagctcttcaagcttacgaatctcataggttggtatgatctctggcacattcggcttcatgtcagggttcatccagcaagtatcaagcccggcgagctgtccgcctttgatatcagcagttagtgaatccccgatgattaatgtgtgctctgctgaaaattgaggaatccgttcaaacacgtaattgaaatattccttcatcggcttttggaagccggtgtcttcagaaacgaaaatgtccttgaagaatggaaataatcctgaatcacggagacgcttatattgtgtgtgagacacgccgtttgtcacgatgtacaaatcaaactgttgctgcagatttgagatgagatcaaatgcaccgtcaataagctgatgtccttcttcaagaaagcggcggtatttttgctcaagcaaagcgccgtccgcttcgtaaccgtactccttgagcaaagcggaaaaacgtgtgtttacgacttcatcccgtgtcatcttaccttcttcaaaggctctccagagaccttgattgatggttttatactgcgccttcatgtcatttgttaaaggaatgttctgatcttcaaacagcaaacgcagggctaaagcttctgccgcttgaaaatcaaggatggtatcatctacatcaaataataaagtgcggtatcgcttcatctgtgtgtctccctttctcatatgtattcaaagtatagcacataaaaaaaggaaaaagccggcgggtgaggcaccgccggctgaaaagagattatttgtttaataagctgtgttttctcgaatataggaagtaaaccagcgttccgacagcgatccagatgacaaatgaaagccatgtgacgccgggaaggctgtacatgaaccaaaggcagatgcctgcgctgataatcggcacaaccggaacgaatggcactctgaaggacgctttgatttcaggatgtttctttcttaacacaatgacagcaatggaaatgaccgtaaacgcggcaagtgttcccatgttcaccagatgggccagcgttccgaggttaataaagccggcgattcccgctgcaacgatccctgtcagccatgtgttgcggaacggggttttaaatgacggatgaacctttgcgaacaatccaggcagaaggccgtctctgctcatggcaaatgtcaagcggacctgtgcgtacagcaaagcgagcatcaccgtcgtaatcccgataatcgcaccgacagaaataattccggcaacagcgtcctgtccgacgaatttcagcgcaaaggatacaggatctccgacattcaatttggcataaggcatcatgcctgtcagcacaagcgataccgcgatgtacagaaccgtacagacggctagagctgaaataatgccgacgggcatgtttttttgcggatttttcacttcctctgatgcgttagaaaccgcgtcaaacccaaggtacgcgaagaatacagtggcagcgctaagtatgacgcctttcatcccgaatggcataaaaggagaccagttatccggtttcacatagccgatgccgacaataatgaacaataatatgatcgcgattttcatcagtacgatgacgttgttaaagcgtgtgctttccttgacgcctctgctgacaatcgcagtgatgaggagaatgatcaccgcagccggaaggttaaatacggcgcccgccgtgcttcccggcgctcctgtcagtgcagccggaatatgaagattgaagccggcaagcagtgattgaaagtatgaagaccagccggtggcaaccgccgacagtgcaatgacatattcaagcatgagatcccatccgatcaaaaaggcgagcagctctccaagtgtcacgtatgagtatgagtacacgcttcccgaaatcggaatggaagacgaaaactcagcataacagaaagcagccagcgcacaggcgagccccgctaaaataaacgatatgatgagggcgggacctgcaccggtcgctgccactgttcctgtaatgacaaaaatccctgtaccgatgacacaaccgataccgagcaaggttaaatcaaatgcgcttaacgtacgggcaaggctttttgacttgctctgcgcactcaatgtttcaagcggtttttttctaaataatgaactcatcaaaagttcctcctagaaatattcaaaatattctaatcattatatgcagttcttgttgtattatattgtcgaaatttgacgtagtcaataaaatatttttctgctttaaatgatagaagcgaaacagcgttgtcgtatcataggatagtaatttttactaatcgtatattcaattttatgcaagatgaaccgatagaaaaaatagattcgcccatattttgatttgcggttataaaggagatgctgaccatgtttcaatatgaagagttgaataaacagtttatcggcgggaaatggcaggagggcagcagcccaaatgtattggaaaacaaaaatccttatactcaaaaaacattcacaacattccgtaaagcgactgctgacgatgtagatgaagcgtatcgggcagcggcgctggcaaagaaaaaatgggatgcggtcaacccgttcgagaaaagaaccattttagaaaaagccgtcacgtatattgaagaaaatgaagaagccattatttatttgattatggaggagctaggcggtacaaggctcaaagcagcttttgaaatcggtcttgtcaaaaacatcataaaagaagcggcaacgttcccaatccgcatggaggggaaaattcttccgtcaacaatagatggcaaggaaaacagattatatcgcgtgccggcaggcgttgtcggtgtcatcagtccgtttaacttcccattctttttatctatgaaatcagtggcgcctgcactcggagccggcaatggcgttgtgctaaagccgcatgaggaaacgccgatttgcggcggaacgctgattgcgaaaatttttgagaacgcgggaattccagcggggctgctgaatgttgttgtcacagacattgctgaaatcggcgacagcttcgttgagcatccagtgccgcggatcatctcatttaccggttctacgaaagtcggcagctacatcggacagcttgcgatgaagcattttaaaaagccgcttcttgagcttggcgggaacagcgccttcatcgtacttgaggatgcagatatagaatatgcggtcaatgcggcggtgttcagccgatttacacatcaagggcagatttgcatgtcagccaaccgcgtgcttgttcattcttctatttatgacaagttccttgagctgtaccaggcaaaagtggaatcgctgaaagtcggcgacccaatggaccctgatacgattatcgggccattaatcaacagcagacagacggacgggctgatgaagactgtagagcaagcaattgaagaaggcgctgtaccagtgaagcttggcggatttaacgggacgatcgtggaaccgacgatcttaaaagacgtcaaaccgttcatgagcattgccaaggaagagctgttcggaccagtcgtctcctttatgaagtttgattcagaagacgaagcggtggatatcgcaaacgaaaccccgtttggcttgagcggtgccgtacatacgtcaaatcttgagcgcggcgtggcttttgcgaaacgcattgaaacaggcatgattcacgtcaatgacacgaccatcaatgatgaaccgaatgtagccttcggcggtgaaaagcaatcaggcctcggccgtttaaacggtgagtggagcctcgaagaatttacaacgctgaaatggatctcggtccagcacgaaaaacgcagcttcccttattaatgaaaaggagtgaatggaattgaccataaatacggaaaaagaaaccgcagatattctggacgcatttatcaaagtagccccttatttaaacagcctggttcaggatgatattacaatcggcatttatgatacggaaaaactgctcgtgaatataccggccaaaaccttttcgctgaacgtaaaagccggcgatccgctgcaggaaggggatatcatcacagatgccatccgcagcaatcagaagaagacgagcatggttccgaaagaattgttcggcttcccattgatcgcgcgtgccatcccgctgcacgacgagaatggaagagtcattggaggcgtcggcctcggaacgagccttgaggagtcgtcaaagctgcatgatgtcgcggaaagcttatcagctgttgttgaacaaacagccgcggctatttccgacatttctgaatcaattaacgggttttcaactcaaatgtcgggcatttcctctcaggcgaaaaaagtaagcgaaagcgccggtgaaatcgccgatatttcagtaactgttaaaggcatctcggaccaaagcaatctgctcggcttgaacgccgcgatcgaagcggcaagagcaggggagtccggaaaaggattctctgtcgtcgcagatgagatcagaaagctagcgacgcattcaaaagaaaatgtcggccaaattgaccagattacgaaaaaaatccacagcctgctgaaagggctggaggaatccattgagtcgattaaccagcatacagacggacaagccgctgctgttgaacaaatttccgccacgatgcaggagatttcaggaagcgcgcagcatcttgcgaaaatggccgaaaaagcgcttgaggaagagtaagagaccggggacaaacatccccggtctttttcttatcctgcatttccatgaaattcgtctgacgttttactagttttattccagcggctgatttaaaatgtacacatgaacttacgtgaggattgataggaaccatgagcatattaaaagcggaaaatctttataaaacatacggagataaaacattatttgaccatatctcctttcatattgaagagaatgagagaatcggattaatcgggccgaacggaacaggaaaatcaacgctgttgaaagtgattgccggcttggaatctatcgaagaaggagaaatcacgaaatccggaagcgtgcaggtcgaatttcttcatcaagacccggagctgcctgcggggcaaacagtgctggagcatatctattccggtgaatcggctgtgatgaaaaccttgcgtgaatatgaaaaagcgctgtatgaactggggaaagatcccgaaaatgaacagcgccagaaacacctgctggcagcacaagcgaaaatggacgcgaacaatgcatgggatgcaaacaccttggcaaaaaccgtattgtctaagctgggcgtcaacgacgtaacaaaaccggtcaatgagctctcaggcggccagaaaaaacgggtggccattgccaaaaacttaattcagcccgctgatttgctcattttggacgagccgacaaaccatttggataatgaaacgattgagtggcttgaagggtatttaagccaatatcccggcgccgtcatgctggtgacgcacgatagatatttcttaaaccgtgtcaccaaccgcatttatgagcttgaaagaggcagcctctacacttacaaaggcaactatgaagtgtttttagaaaaacgcgcggaacgggaagcgcaggctgagcaaaaggaaacgaagcggcaaaacctgctgcgccgcgaactggcttggctcagacgaggagcgaaagcccgctccacaaaacaaaaagcgagaattgaccgggtagagacgcttaaagagcagacaggccctcagtcatcaggttcactcgattttgccattggctcgcaccgtctcggaaaacaggttattgaagcggagaacgtcatgatcgcttatgacggccgcatgctcgtcgaccgttttaatgaacttgtcataccaggtgaacggatcgggatcatcgggccgaacggcatcgggaaaacaacgctgttaaatgcccttgccggccgtcatacgccggacggaggcgatattacgatcggacagacggtcagaatcggctactatactcaggatcatagtgaaatgaacggtgagttaaaagtcattgactatataaaagaaacggcggaggtcgtaaaaacggcagatggcgatatgattacagctgaacaaatgctcgagcgtttcctcttcccgcgttcgatgcagcagacgtatatccgcaagctgtccggcggggaaaaacgccgtttatacttgcttcaggttctcatgcaggagccgaatgtcctgtttctcgatgagccgacgaacgatttggatactgaaacattaagcgttcttgaggattatattgaccagttcccaggcgtcgtcatcaccgtatcccatgaccgctatttccttgaccgcgtcgtcgaccgtttgattgtatttgaaggaaatggtgtcatttcccgctttcaaggctcctatagcgactatatggaggagtcaaaagcgaaaaaagcggccccaaaaccggcagctgaggaaaaaacggctgaagccgagccgaagaaaaaacggaaaaagctttcttacaaagaccagttggaatgggacggcatcgaagataaaattgcccagctggaagaaaagcatgaacagcttgaagctgacatcgccgcagcaggcagtgattttggcaaaatccaagagctgatggccgagcaggcgaaaacggcggaagagcttgaggctgcgatggaccgctggacagaattgtccctcatgatcgaagaactggaaagctaaaaagcgtggccgcagcaggccgcgctttttttcacataatggacaaaaacgaaccggcctgcttatgttaggataaagttgtgtgtcagcggcacatggaaaactaacggagatgatgaagtatgacatgggcgatcgtgatgttaattctcatgagtctggtgaaaatcgtattaacctgtcttcctacaggcgtcatagaatggctgctcggcaaatttgaagtgcacgccaagctgagtgacgaaaatgcgagtctctctctagatggaaaacgcctcgagggtgcagagaagcagaaagtgattgatcaatttaacgaagctatcttcctggaaaaatattatatctatccaggtgatgaagagcgttatttacatccggaaaacggcggcacgcctctggtgatagatacaaaaaaaggaaaaaaagacgtgaagctgttcgtgtaccgctacgacgaccatatcgacgtcgtgaaacagtacaagaagaaagtgatcgcgtatcgagtgctttctgaaagccttcaaaaagagtctctgtcagtggcgggaagtttagcttaaacaggaaagtgaaagacgggtgctgtatgctgctcgtcttttttattgttttttaaaacttaacgtttacgttaaggttcaaaaggtgtataatggtaacagaaacggcgaagggggatttaccttggaatggatgaagattgatcaagtggccaaaagaagcgggctgacaaagcggaccatccggttttatgaagaaatcggcttgattccggcgccgaaacggacagacggcggtgtaaggctttattcagaggatgatatggaggagcttgagaaagtcatcagcacaaaagaggtgctcggtttttcccttcaggagcttcagcatttcatggaaaccagccgccagctagagttaaacaaagaggggtatttgttgtcactggatcctaaggaacggaaagaaaaactggaggaaattcaggaaaccctgaatcaccagctggatttgattgatgagaaaatccgcacattccaaagctttaaagaacgcctgcagggcatgaaaaataaagcggaacgcgccattcaatcaatcgaatgaaaagtttgttaaacgctatttttgtagcgtttcttttaatggaataaagatggaggttaggtcaaatggataagacaacacaagtgaatcagaaaacgggtttgctcagccagccaaaagcggtatgggctgtcgcgtttgcctgtgtgatttcctttatgggaatcgggctggtcgatccaattcttccggccattgccgcacaactacatgcttcacctagtgaagtatcactcttgtttacaagttatttgcttgtaaccggatttatgatgtttttctcaggagccatttccagccgcatcggcgcgaaatggacattaattctcggacttatttttattattgtgtttgcggggcttggcggcagctcaagctcaatcgctcagttagtcggctatcgcggcggctggggattagggaatgctttgtttatttcaacagcgcttgcggtcatcgtcggcgtgtcagtcggcggcagcgcccaagcgattattttgtatgaggccgcgctcggtctcgggatttctgtcgggccgcttgcaggcggagagctcggaagcatttcatggcgcgcaccgttttttggagtatctgtcctgatgtttattgcgttaatcgcgatttctttcatgcttccgaagctgccgaaaccggcgaaacgcgtcggtgtgtttgatgcgatgaaggcactcaaatataaaggcctgctgacaatggcggtatcggcattcctatacaactttggattttttattttgctagcttattctccgttcgtactggatttagatgaacacggtcttggatatgtcttcttcggctggggccttctgctggcgattacgtcagtctttacggcgccgctcgtgcacaaagcgctgggcacagtgcgttcgctcgtcgttctctttatcgcctttgcggccattctcgttattatggggatctggacagaccatcagactttgattattacatgtatcgttgtcgctggtgctgtcctcggtatggtgaatacgatcatgacaaccgctgtgatgggttctgcgccggttgaacgttcaatcgcgtcttcagcctacagctcagtccgcttcatcggcggcgcgctcgccccgtggattgcaggaatgctgtcagaacactttactgcaagcacaccatatacagtaggcggaatcgtcgtttttgtcggcatgcttgtccttctcatgggacgtaaacatcttgctggaattaaggcggggcattaataacgaaagacactgcacagatgcagtgtctttttttaatcgtggaatctccccattactaccgtattgtagtgatttccgtcagaaagcaatttctccttttttaagattccttctgcttcaaatacgtatgtttttatagtgaaatggctctttaatttgtttccaggatattcagtgagatttttttaattccgttggcatccgcttcggtcaggcattgatgcggctgggatttatcttgcagaagctgagaatgtgtccgttcatttacgattgccatttcaagtgatggttcatgctgtagagggaacgtttgccatggataaggcaaagcctgacgaatatgatcataaatgtttagaaacgctctatcaatacatacacagcgtcatgaaaaacagcttttctcggtcgagtggtttaccgcttgggcagatgaggaggattttgagctgtctgccaaaaaagagctgacccttgatgaattcacatctccattgcagctcattttaaaagacagagagcttttgagaatcgttaagaataaacggcagtaaaaaacccgcccttcagcaggcgggtttttttataaattaaagcactttcgtcgtccaagactcgcagttccatgtttctgtcgcgatatccatataaaagtctggctcgtgggaaatgagcagaatggagcctttatattctttcagagcgcgcttgagctcttccttggcatcgacatccaagtggtttgtcggctcatcgagcaccagcaggtttgtttctgagttgattagcttgcacaatctgactttcgctttttcgcctccgcttaatacggagacgcggctttcgatatgctttgtcgtcagcccgcattttgccagagcggcacggatttcatactgcgtataagaagggaattcgctccatacttcttcgatgcacgtattgttgtttgtttccttgacctcttgctcgaaatagccggtatagatgtgctcaccgcgttcaacagagccttcgagcggctggatttcaccaagcaaacttttcagcaatgtcgtttttccgatcccattcgcgccgtaaagggcaattttttggccgcgctccatgcggaggttgagcggacgggacagcggggaatcgtaaccgatcacgagatccttcgtttcaaaaatcagcttgcctgacgttctcgccggcttaaagtggaattccggctttggcttttctgccgcaagctcgatcatatccatcttatcgagtttcttttggcgggacatcgccatgtttctcgtgctgacacgcgctttgttgcgggcgacgaaatccttcagctccgcgacttcctgctgctgctttttgtaggccgcttcaagctgctgttttttcacctcgtagacttccataaactgatggtagtcgccgacataacgtgtcagctcttgattttcaacgtgataaatcaggttgatgacactattcaagaacggaatatcgtgggaaatcaggatgaacgcgttctcgtattcctgcaggtagcgtttcagccattcaatatgctgttcatcaagatagttggtcggctcatcgagaagcagaatttccggcttttcaaggagaagcttagcgagaaggacctttgtgcgctgtccgccgctcaaatcggtgacatctcgctctaaaccgatatcgctcaaaccgagaccgcgggcgatttcttccaccttggaatcaatgacataaaaatcattgtttgtcagcgcgtcttgaatgacgccgacttcttcaagcagcttctcgagctcgtcgggatcagcctcgcccattttgttgtaaatctcgttcatttcctcttccatcgcaaataaataatggaatgcgtctttcaggacgtctcgaatggattttcctttttccagcacggtatgctgatcaaggtatccgacacggacgttttttgaccactcgacttttccctcatcaggttcaagctttccggtaataatattcatgaaggttgattttccttcaccgtttgcgccgatcaaaccgacgtgctcgccttttaacaggcggaaggaaacgttattaaaaatggcccggtccccgaaaccgtggcttaaatcctttacagataaaatactcatgtttacacctctatcgttatcaaacacgcacaatcggcgtgtaatattcactcttttgattataaaggaggattcggaatgttgaaaggtataggaaagaaaaagaaaaattgcgttccgggcgaggttttgagatactatggaatagatttcaggaattgaggagaacaaaatgacgcaaacttggccatttttacataatgcacaatcatttatacaagagaattggaatgcttccggctttcaaacgccaacccctgttcaagagcaggcagcccagctgatcatggacggaaaggacgtcattgcagaatcgccgacaggtacagggaagacgctggcgtatgcgctgccggtcttggagcggatcaaaccagagcaaaagcatccgcaggctgtgattttagcgccttcccgtgagctggtcatgcagatttttcaggtgattcaggattggaaagcgggctcagagctgcgcgcggcttccttaatcggcggggcgaatgtgaagaagcaggtcgaaaagctgaagaaacatccgcatatcatcgtcggcacgccaggcagggtatttgaactgattaaagcaaagaaactcaaaatgcatgaagtgaaaacgattgtacttgatgaagcggatcagcttatcctgccggagcatcgcgaaacgatcaaacaaattattaaaacgacattaagagaccgccagcttctatgtttttccgcgacactcaaaaaggaaacagaggatgtgctccgcgaattggcgcaagagcctgaggtgttgaaggtacagcgaagcaaggcggaggcagggaaagtgaaacatcaatacctgatttgcgaccagcgcgacaaagtgaagctgctgcaaaagctgtcaaggcttgaaggcatgcaggcactcgtatttgtgagagacattggcaacctgagtgtatatgcggaaaaactggcatatcaccacgttgaactcggcgttttgcacagtgaagcgaaaaaaatggagcgggcaaaaatcattgccgcattcgaagacggagagtttcctcttttattggcgactgacattgccgcacgcggtttagacattgaaaacctgccatacgtgattcatgctgatattccagatgaagatggctatgtccacagatcaggacgaacaggccgggccggaaaagaaggcaacgtgctgagccttgtgacaaaattggaggaatctaagctgaaaaaaatggcgaagaagcttggtgttgagctgagtgaagctgtgtatgcaggcggaaaactgaagacgaaataaaaagaagggcgaaaagccctttttttgttgtaaaataatagaaaaagtttcgcgcagggggtgggaaggtggtttcaatagacaggtttcaagcagtgaaggagtcagagctgaaaattcttgaaagctggtttgagaatgaggataccagacggagaatggatgggatgctgccattagatgaatggtatgcacgagtaaataaagataaacacgatactgtcatcatggcgtatgatggacagctgccggcagggatggtcgttattgagttcggggagaagcggacatatattggattgatcgtcaatcctttgtaccggcttcaagggtacggaaaacggatattgcaaaagctgatgaccgaacctgattttactagcgtgcgggaatgggtggcatgcattgaagaagacaatcgaatcagtttagcttgctttcaagcagcaggattcactttggaagatacagaacctgatgaagatggttttcttacgctgattcttcgcagctgatctcatcgaaacacaaaaggagggcaaaaagccctcccgttttcatcttcattcagctcggatcactgaccttgatcagctgtttccctttattttctcccttaaataaaccgagaaacgcgtcaggaatgttttcgaagccttctgtgatggtttcctcgtaatggagtttaccagccttcagccattcggccagctgttttgctccctcagaaaaacgatcggagtagtcgcttacgataaagccttgcatcagcgacttcgttttaatgagttttgattggacacgagggcccatgtcatctgcttcgctttctgcgttataggaagaaatggcgccgcacaccggaatgcgggcaaattcattgagcagattcatcaccgcgtctgaaatcggtccgccgacattgtcaaaatacacatcgacaccgtctggacaagcgttttgaagcgctttttggatatcatccgctgttttgtaattgatggcttcgtcaaactgaagctcctgttttaaatagtcgattttttcatcagaacccgcgataccgacaactcgcgcgcctttgattttggcaatttgcccgactgttgaaccgacggctccggcagctccggagacaaccacggtttcgccttccttcgggcgtccgatgtccagcaatccgaagtatgctgttaagccggtcattcccaaaatgccgagataggccgaagcgggagcaaggcttgtatcaatttttcgcaaggcagactcgctcacagcggaaaattcctgccagctgagatttccgatgacgatatcgccttttttcagatgattcccgtctgacacaacttcagcgataaccccgccagaaagcgcttcatccaaggcgaacggctcaacatatgacttcgtatcctgcatacggccgcgcatataagggtcaaccgaaacataaagcgttttgacaagcacttccccttgcttgggttcaggaaccggaatggtttcaaagcgaaagtcttcatgaacaggaataccttgtggacgtcttgctaattgaatttgctgctgagatgctgtcattttcatcctcctatcacttggttgacaccactgtaacatggacaggagaggaaatacaaaaggtaagctggcatacaaaaaaggagagggggctcctctccttttcatttcgcccgtaatttcgggcacagtcccgtcggcaggcacattggcttctggtcgatcgggcttctcatgatgcagcattccaagccgaagacttcacggaaaaatggctgggtgaacacatcttccggtgttccggcgttgtatatttttccgtccagcacactgattagatagtcagcgtattgagcggcttggtttaaatcatggagcaccatgacaacggtgcggccatggtcgcggttcagctttttcagcagttcaagcacttcaatctgatgtgagatgtctaaatacgtggtcggctcatcaagcaaaagcaaatcagtgccttgcgcaagtgccatggaaatccaggctctttgtctttggccgcctgagagggcatcaagtgtccgatccttcagttcaatcatgcccgttgcttccagcgcccactctaccatgtcatgatcctcttgggtatgcttggataacagctttttgtgaggatgtctgccaaaatagcataactcctctaccgtcaatccttcaggggcctgaggagattgtggaagaatggccagtttttttgcgacttcttttgatggctggcggtggatgtcttttccttctagtagcactgtaccgcttttcggggccatcagcctggcgagcgatttgaggattgttgatttaccgcagccattagcgccgatgagcgcagtgatttttccttcttctatctttaagtcgactccgtcaataatcactgtactgtcatatgaaagagtgagctggtctgcagccagttttcccatggtatcctctccctactgtttcctcgcttcgaatttcaataaatataagaaataaggcgcgccgatcacggctgtcagtattccggcaggtatttcaaccggaggcatgatgccgcgccctaacgtatctgcaattaataatataatagcaccaatcaatgccgatgcaggcagtaaatatttagctttttctccggtaagccgtctggcgatatgcggagcaagcaagccgataaaaccgattgagccgacgacggctacacagcttcccgccagcgccaccgcggtgaaaatcaggatgaatctcagccggtttgcgttttctccgagaccctgtgcaagctcatccccgagtgacataagatccagcttcggtatgagtatgcagacgatcggaaaaagaatcaaaagccatggcgcaagcaggttgacttcttcccagtttcttccccagaggcttcctgtcagccaaatgagtgcagcattcacgtcgcctggaaacttgaccatcatatattgcattccggcgtggcagaccgcgcctaaagcaatgcctgataaagccagtgaagagggctgaatgctcttttttcgggctatcattaataatagtacagcaataatggcggctccggcaaatgcggagaacggaagcacgtataccggcgactcaggaaagatgagaatcacagccatcgccgcaagtccggagccttttgaaatgccgacaacgtccggggaagcgagtggatttcggatcacaccctgtaaaatcgctccggcagcggcaagcccagcaccggccaaaatcgctaatataatgcggggaaggcgatattgctggatgataaattcaaaggaatgatccagtcccagcagattcgtcactaccgcatcaggtgaaatgtataatgcaccgattccaatgctgatgacggacagaacgattaaaatcacggccaatatgagtatcgccagtaaggggcgtttttgttttctggttgttttcttcatttcagatgtcgccctttccttgccaaatataagaaaaacggcgttccgataatcgcggtgacaatgccgaccggtgattcataaggaaatgcaatccatctggccagtacatctgcgtacaccagcaaaatggcaccgaacagtgccgaaaacggaagcacgtattgataatgttctccgatcagcttgcggacaatatgcgggacgagcagcccgacaaagccaatcggcccggcgacggctacggaagcgccggaaaggattaaaataatcaaactgatcagaatccggatgccgttcatattttgtccaagcccttttgctgtttcgtctccgagaccgagaacagaaacagaaccggaaaatacgagggcaagcccgatgccaatgacagaaaacggagcgatggttatgacgtcctgccagttgctgccgtcgattgcgcctgtcatccagtacagaacatcctcacctgactcatttaaaataatgatggcctgtgtcatagaggagaggaacaaatgcacggccattcctgacagcgccagcttaacaggtgtcattccgccggatgaggcaatcatatacacaatcgcgccgcctgctgccgcacccgcaaaagcgaatataacagatgaatagggcgatgccggcagaatgacgagagaagcaacgacaaaaagcgatgcacccgcattcacaccgaaaatttggggtgaagccagagggtttctggtcatagcctgcattagcgcccctgctacagctaggctggcgccgacaaaaacgccgattaatgtgcggggaaggcgaagagtagagatgatgagctgttcctttgaaccgtcccatacaaaaagatatttcaatgaatctatgatgccgatgtctgaggctcctactgaaagattcagcccaagcccaaatataaaaataatcagtgcaatgatgaacatcatcagtcttgatgatgagcgccgtttggctgattgatacaacagtctcacttccttactgcgtctggttgcaaaaacgaagaagcaaggattcccctcgcttctcatttgtcctatttattatacacttttttaagcacatctttggcgcttgtttcactagacttgatgcctctgaatcttgtccaagtgtcacggtccgcatcatagacttgtccatttttcaccgctttgagatttttccagagcgggttcgttttccactcatctacaatggttttgccttcgttggctgagatgaacaaaatatcaggatcgattttgctcaattgctcaaggctgacctcttgataggcgttatctgacttcacagcgtgtgtaaagcctagcattttaaagatttctccgtcataggatgatgatgtatgaagctggaaggaatccgctcttgcaacgccgagaacgatgttgcggttttcatctttcggaagttcggcttttagatcgttgatgacttttttgtgctcggcaagcttttcttttccttcatcttctttatttaatgctttagcaatggtcgtaaagctgtcgatcgtttcgtcatatgtcgcttcacggctttttaattcaatcgtcggagcgatttgtttcagctgtttataaatgtttttatggcgctcagcgtcagcgatgattaaatcaggcttcaaggaactgatgacctcaagattgggttcgctgcgtgtgcctacagatgtgtaatcaatggagctgccgacaagctttttaatcatatcttttttgttgtcatctgcgatgcccaccggcgtaatgccgagattgtgaacggcatccaagaatgaaagctcaagcacaaccacccgcttaggtgtgccgcttactgtcgtttttccttcttcgtcatggatcactctggaatccttagacttgcttccgccgcttccgttgttattctggcttgatgaacagccggatacaatgaggcaggcgagcaataaaacacttatgatggcaatcaacttgttagaataggtgcgcatgtcattcttccttttttcagatttagtaatgagaatcattatcacatgtaacactataatagcatggcttatcatgtcaatatttttttagtaaagaaagctgcgttttttactgctttctcatgaaagcatcatcagacacaaataagtggtatgaagcgttaccgtgtctttgagacaaaaacgcatgggcgttggctttagaggtttcgaacatatcagcagtgacataaggaaggagagtgctgagataaccggacaatttcttttctatttcatctgttagtgcaaattcaatgtcgccgatattcatgataatcgagaaaacaaagtcgatatcgatatgaaaatgttcctcggcaaaaaccgcaagctcgtgaattcctggtgaacatccggcacgcttatggaaaatctgtttgactaaatcactcacaatccaagcattgtattgctgttctggtgaaaagtattgcattagacatacctcctgctcgtacggataaaggcagcgtttcatggtcgtgtgctccgtgcagcggcttctctttaattttgatttttctgaaaataggtcccgttcctatcactttaccatggacggaaaacaaatagctactaccattcctcctgtttttctctttaatgttctggaatctgtttcaggtacagacgatcgggtatgaaagaaatatagaaaacatgaaggaggaatatcgacatgaaaccagttgtaaaagagtatacaaatgacgaacagctcatgaaggatgtagaggaattgcagaaaatgggtgttgcgaaagaggatgtatacgtcttagctcacgacgatgacagaacggaacgcctggcagacaacacgaacgccaatacgatcggagccaaagaaacaggtttcaagcacgcggtgggaaatatcttcaataaaaaaggagatgagctccgcaataaaattcacgaaatcggttttcctgaagatgaagccgctcaatttgaaaaacgcttagatgaaggaaaagtgcttctctttgtgacagataacgaaaaagtgaaagcttgggcataaagcaaggaaaaaaccaaaaggctatgacggccttttggtttttttgcggtctttgcggtggtattttgcagaatgccgcaataggatagcggaacattttcggttctgcatgtccctcaatttgctattatatttttgtgataaattggaataaaatctcacaaaatagaaaatgggggtacatagtggatgaaaaaagtgatgttagctacggctctgtttttaggattgactccagctggcgcgaacgcagctgatttaggccaccagacgttgggatccaatgatggctggggcgcgtactcgaccggcacgacaggcggatcaaaagcatcctcctcaaatgtgtataccgtcagcaacagaaaccagcttgtctcggcattagggaaggaaacgaacacaacgccaaaaatcatttatatcaagggaacgattgacatgaacgtggatgacaatctgaagccgcttggcctaaatgactataaagatccggagtatgatttggacaaatatttgaaagcctatgatcctagcacatggggcaaaaaagagccgtcgggcacacaagaagaagcgagagcacgctcgcagaaaaaccaaaaagcacgggtcatggtcgatattcctgcaaacacgacgatcgtcggttcagggactaacgctaaagtcgtgggaggaaacttccaaatcaagagtgataacgtcattattcgcaacattgaattccaggatgcctatgactattttccgcaatgggatccgactgacggaagctcagggaactggaactcacaatacgacaacatcacgataaacggcggcacacacatctggattgatcactgtacatttaatgacggttcgcgtccggacagcacatcaccgaaatattatggaagaaaatatcagcaccatgacggccaaacggatgcttccaacggtgctaactatatcacgatgtcctataactattatcacgatcatgataaaagctccattttcggatcaagtgacagcaaaacctccgatgacggcaaattaaaaattacgctgcatcataaccgctatcaaaatattgtccagcgcgcgccgagagtccgcttcgggcaagtgcacgtatacaacaactattatgaaggaagcacaagctcttcaagttatccttttagctatgcatggggaatcggaaagtcatctaaaatctatgcccaaaacaatgtcattgacgtaccgggactgtcagctgctaaaacgatcagcgtattcagcgggggaacggctttatatgactccggcacgttgctgaacggcacacagatcaacgcatcggctgcaaacggactgagctcttctgtcggctggacgccgtctctgcatggatcgattgatgcttctgctaatgtgaaatcaaatgttataaatcaagcgggtgcgggtaaattaaattaagaaagtgaaaaacacaaagggtgctaacctttgtgttttttaattaattaaaatgtttattaacttagttaaggagtagaatggaaaaggggatcggaaaacaagtatataggaggagacctatttatggcttcagaaaaagacgcaggaaaacagtcagcagtaaagcttgttccattgcttattactgtcgctgtgggactaatcatctggtttattcccgctccgtccggacttgaacctaaagcttggcatttgtttgcgatttttgtcgcgacaattatcggctttatctccaagcccttgccaatgggtgcaattgcaatttttgcattggcggttactgcactaactggaacactatcaattgaggatacattaagcggatttgggaataagaccatttggcttatcgttatcgcattctttatttcccggggatttatcaaaaccgggctcggtgcgagaatttcgtatgtattcgttcagaaattcgggaaaaaaacccttggactttcttattcactgttattcagtgatttaatactttcacctgctattccaagtaatacggcgcgtgcaggaggcattatatttcctattatcagatcattatccgaaacattcggatcaagcccggcaaatggaacagagagaaaaatcggtgcattcttattaaaaaccggttttcaggggaatctgatcacatctgctatgttcctgacagcgatggcggcgaacccgctgattgccaagctggcccatgatgtcgcaggggtggacttaacatggacaagctgggcaattgccgcgattgtgccgggacttgtaagcttaatcatcacgccgcttgtgatttacaagctgtatccgccggaaatcaaagaaacaccggatgcggcgaaaatcgcaacagaaaaactgaaagaaatgggaccgttcaaaaaatcggagctttccatggttatcgtgtttcttttggtgcttgtgctgtggatttttggcggcagcttcaacatcgacgcaaccacaaccgcattgatcggtttggccgttctcttattatcacaagttctgacttgggatgatatcaagaaagaacagggcgcttgggatacgctcacttggtttgcggcgcttgtcatgctcgccaacttcttgaatgaattaggcatggtgtcttggttcagtaatgccatgaaatcatccgtatcagggttctcttggattgtggcattcatcattttaattgttgtgtattattactctcactatttctttgcaagtgcgacagcccacatcagtgcgatgtattcagcatttttggctgtcgtcgtggcagcgggcgcaccgccgcttttagcagcgctgagcctcgcgttcatcagtaacctgttcgggtcaacgactcactacggttctggagcggctccggtcttcttcggagcaggctacatcccgcaaggcaaatggtggtccatcggatttatcctgtcgattgttcatatcatcgtatggcttgtgatcggcggattatggtggaaagtactaggaatatggtagaaagaaaaaggcagacgcggtctgccttttttttattttcactccttcgcaagaaaacggattttgaaaaatgagaaaatttcctgtgaaaaatggtatgatctaggtagaaaggacggctggtgctgtggtgaaaaagcggttccatttttccctgcaaacaaaaataatggggctgattgcggctctgctggtctttgtcattggtgtgctgaccattacgttagccgttcagcatacacagggagaacggagacaggcagagcagctggcggttcaaacggcgagaaccatttcctatatgccgccggttaaagagctcattgagagaaaagacggacatgcggctcagacgcaagaggtcattgaacaaatgaaagaacagactggcgcgtttgccatttatgttttggacgaaaaaggagacattcgcagcgcctctggaaaaagcggattaaagaaactggagcgcagcagagaaattttgtttggcggttcgtatgtttctgaaacaaaagcggatggacgaagagtgatcagagggagcgcgccgattataaaagaacagaagggatacagccaagtgatcggcagcgtatctgttgattttctgcaaacggagacagagcaaagcatcaaaaagcatttgagaaatttgagtgtgattgctgtgcttgtactgctgctcggatttattggcgccgccgtgctggcgaaaagcatcagaaaggatacgcttgggcttgaaccgcatgagatcgcggctctatatcgtgagaggaacgcaatgcttttcgcgattcgagaagggattattgccaccaatcgtgaaggcgtcgtcaccatgatgaacgtatcggcggccgagatgctgaagctgcccgagcctgtgacccatcttcctatagatgacgtcatgccgggagcagggctgatgtctgtgcttgaaaaaggagaaatgctgccgaaccaggaagtaagcgtcaacgatcaagtgtttattatcaatacgaaagtgatgaatcaaggcgggcaggcatatgggattgtcgtcagcttcagggagaaaacagagctgaagaagctgatcgacacattgacagaggttcgcaaatattctgaggatctcagggcgcagactcatgaattttcaaataagctttatgcgattttagggctgcttgaacttggggagtatgatgaagccattgatctgataaaagaggaatatgcgatacaaaatgaacagcatgatcttttattccataacatccattcgcagcaggtgcaggccattttgttagggaaaataagcaaggcatcggaaaagaaggtcaagctggtgattgatgagaacagctcactcgcgcctcttcctgcgcatatcggcttgtcccatcttattacgattattggcaatttaattgataacgctttcgaagctgtagcggagcaaagcgtgaaggaagttttgttttttatcacggatatgggccatgacattgtcattgaagtatcagacacagggcccggtgtgccgccagagaaaatagaagctgtgtttgagagaggctattcttcaaaggggatgaggagaggctacggtctggccaatgtgaaagactcagtgcgtgaactgggcggctggatcgaactggcgaatcaaaaaactggcggggcggtattcactgtgtttataccgaaggagaaacaaagggggaatccatttgattcacatcgcgattgcggaggatgattttcgagttgcgcaaatccatgagagattgattaaacagcttgatggattcaagattatcggcaaggcggctaacgcaaaagagacattggcgcttttgaaggaacacaaggctgatttgcttctgctggatatttatatgccggacgagcttgggaccgcgttgattcctgatatacgaagccgatttcctgaagtggacattatgattatcacagcggcaacagaaacccgtcatttgcaggaagcgctaagggcgggaattgcccactatttgatcaaacccgtaacagctgacaagttcaggcaggtgctgcttcagtataaagaaaaaaggaagctgctcatgtctcagccggaggtcagccaatccatgatcgaccatatttttgggaacagtgtgaagacagctttgccggcagagaatttgccgactggcattaattcgattacactgcgaaaaattaaggaagcgcttcagactgcgtcagaaggattgacagcggaggaacttggggaaaaaatgggggcgtcacgaacaactgcccgccgttatgccgagtaccttgtgtcaaaggaagaagcaagagccgagcttgaatacgggattatcggcaggccggagagaaaatattatttggcggcggattagatatgaaaaaatctataatcctattgattattctattgatctttactcagggtgatatcaggcaggcggctgcgccgcgcctgccggacgggccgatagaaattgtcgtccctgccgaaccttctggcggctgggatgtcacagcgcaggcgatccaatcagttttgaggcagaagcagatcgtgaaggatgatgttcatatcgtctataaatccggcggcgggggagagaaaggctggaaatatgtcaacaaaagcagcaaacaaaccatcagcatgacgtccagcttaatattgagcaatgatcttctcgggcaaagcaaattaaaaatggccgattttacgccgctcgccattctctccaaggaatggcagacggttgcattgccaaaaggatcagcgttaacaaatggcaaggatgtgctgaatgagatcaacatgcatcccggcaaggtgagaatcggctttgccccggggtttggcaatgatgatcagctctcgttcgtcagagcggcagatatgtacggcattgacccgtttgacattcaattctcacagtatgacagcagcgaacagctcattcaggcgctgatcagacatgagatagaagcggcttccatgaccctttctgaagcgaaaccatatgaacgaaacggcgatatcacgttagccgctgtaacatctgataaaagacttcccggttttccaaatgtaccgacgtggaaggagcagggaatcccgtttgttttttctcattggagaggaattttgggtccgaaaaatatgtctgaggaagagatttcttactgggatcaagcgctaaagaaggtcacctcttcacctgaatggaggcggaaaataaacgaacaggactgggaaagcttttatttaaacagcagggaaacgaaacggtttttagaagagcaatctgctttttatcaaagcatcatgacaggaaattaagatcccggcatccccgggatttttttcatgccgaaaattgatcaaaaagaacaaaacggttttaaaaaattaaaaatacaaaaaaaacaaattatttacttgcggttggttttcccatacgatggcaaaaaggcaagacaaaaaggggagtaagggagaaaaaaatgtaagcggattcatttaagggggaatggatgtgttagcaatcttaggctttctcatgatgcttgtgtttatggcattgatcatgacaaaacggctttctgttttaacagcattagttttgacgccgattgtgtttgcgcttatcgccggatttggatttactgaagttggggacatgatgatttcggggattcagcaagtcgcgccgactgcggtcatgattatgtttgcgatcttatattttggaattatgattgatacaggcctgtttgatccaatggttggcaaaattttaagcatggtcaaaggagaccctttaaaaattgttgtcgggacagcggtccttacaatgctcgtcgccttggacggagatggctcgacaacgtacatgattacgacaagcgccatgcttccgctctatttgctgctaggcatccggccaattatcttggcaggaatcgcgggagtcggcatgggaatcatgaacacaattccatggggaggtgcgacgccgagggcggcgagtgcgctgggtgttgatccagctgagcttacagggccgatgattcctgtcattgcaagcgggatgctttgtatggtggcggttgcgtatgtgcttggaaaagcggaacgaaagcgccttggtgtgattgaactgaaacagccagccaatgccaatgaaccggcggctgcggttgaagatgagtggaagcggccgaagctttggtggttcaatttattgttaacgctttctttaataggatgtttagtatcgggtaaagtcagtttaaccgtactgtttgtcattgcgttttgtattgcgctgattgtgaattatcccaatctcgagcatcagagacagcgcatcgcggcgcattccagcaacgtgctggctatcggttcaatgatttttgccgcgggggtgttcacggggattttgacaggcacgaaaatggttgatgaaatggcgatctcgctcgtgtccatgataccggaacaaatgggcggattgatcccggcgattgttgccttaacaagcggcattttcacattcttgatgccgaatgacgcgtatttctacggggtgctgccgattttatcagaaacagctgtcgcatacggtgtggataaagtggaaattgccagagcctctattatcggccagccgattcatatgctgagtccgcttgtgccatccactcatttgcttgtcggactcgtcggagtttctattgatgaccatcaaaaattcgcattgaaatgggcggttctcgcagtgatcgtcatgacggctatcgctctattgatcggtgcgatctctatttccgtatgataattcaggcgtaatgacacacactaacggcatacaacattccggaggtgtcattatgagtgatccttatatgccgctgacttcagtcagaagcggaacggggttcgaagcggcaaaaggggtgcacggcctgactgtgcaaattgcgaatgtctattttattcagctgccttctgaacctcactcatttgttttaattgatgccggcatgcctcaatcagccggcatgattgtcaatgaagccaaacaaagattcggtgaagggtttcagctgaaggcgattatcctcacacacgggcactttgaccatattggggcaatcgaagagatccttgagcattgggatgtgcctgtttatgtccattctcgggaaatgccttatgtaacaggtaaaaaggattatcctccggctcgtcctgacagcaagagcgggctggtcgctaagctgtcgccgctgtttccgcggcactccatcgatatttcctcacatgtccaggcactgccggaagacggttcagtcccttttcttgacgagtggatgtggatcgcgacaccaggacacacgccgggccatatttcgttattccgcgatgacggccgcgtgcttgtagcaggtgatgctgttattacagtggaacaggagaaaatggctgacgtcttgatacaaaaacaggagcttcacgggccgccggcttatttcacgcctgacacagagacggccgcggagtccattctaaagctggccggtcttgaaccggaagcgttattgacagggcacggcataccgatgaccggcaaaaactttcgaagtgacttaactgaattggcaaatcggttatcgtctatttgacacccgcaccacgcgggtgttttttattgttttccaggaagttgcagaaaaatcatttgtcttgccgcttaaaaacgatacaatgaaaagcatgaagtgatgtgaaggggagagtttgttggaagaaaaagaaatactctggaacgaagcgaaagcgtttattgccgcatgctatcaggaattgggaaaggaggaggaagtgaaagaccgtctcgaggacattaaaagtgaaattgacctgaccggaagctatgtacatacgaaggaagagctggagcacggagcgaaaatggcttggagaaacagcaaccgctgcatcggcagattgttctggaattcgctgaatgttattgacagacgagacgtccggacgaaggaggaagtgcgtgacgccctcttttaccatattgaaaccgccaccaataacgggaaaatcagaccgaccattacgattttccctccggaagagaagggtgaaaagcaagtcgagatctggaatcatcagctgatccggtacgctggatatgagtcagacggagaaagaatcggcgacccggcttcctgttccctgacagcagcctgcgaagagctcggctggcgcggagaacgaacggattttgacctgctgccgctcatttttcgcatgaaaggcgacgaacagcctgtctggtatgagctgccgcgttcacttgtgatcgaggttccaatcacacatccggacatcgagacgttttctgatttggagctgaagtggtacggcgtgcctatcatctctgatatgaagcttgaggtcgggggcattcattataatgccgcgccatttaacggctggtatatgggcacggagatcggagcgagaaacctcgcagatgaaaagcggtacgacaagctgaaaaaagtagcgtccgtgatcggcatcgccgctgattacaatacggatttatggaaggatcaagcgctagttgaattgaataaagctgtgctgcactcgtataaaaagcagggtgtcagcatcgttgaccatcatacagcggcaagccagtttaaacggtttgaagaacaggaggaagaagcgggcagaaagctgacgggggactggacgtggctgattccgccaatttcacccgctgccactcatatcttccaccgatcctatgataactcaatcgttaagccgaactatttttatcaagataagccttatgagtaaacaatagaaaatcgatgatggccttcaaggctgcgggattcagtcacagagatgtcggtaacctttgagaaagggcttccgttctttacagcctcaacaaacgattgcagggcgttttccggaccctctgccaaaatctcgacacgcccgtcatcacggtttttgacccagccggccagttttcgcttatcagcttccatttgaacaaaatagcgaaagcccacaccttgaacccggccgtctacaatgattcggtattgaagcatgtaaaaaccaccttttctttttatgataatcaatcattttacaacctgtaaaggggatgtgtttgtatgaaaccagagcgctattcagttctttctcttaatctgggaaaaccgcagacgcttgaatatgacggaaagaaaatcgataccggcatcatgaagcgtccggctgaatcagccgtcatgctgtatcgggagaattttgaaggagacggacaggcggacctcgtcaaccacggcggacctgataaggctgtctgtgtctacccggcggagcattatccgttttgggaagagttcctctcaagaccgctgtcaaatgccgcatttggagaaaatctgacggtcgcgggcctgactgaggagaatgtttgcatcggggatgtgttcaggcttgatgaagctgttgttcaggtcagccagccgcgccagccgtgtgtaaagctggcgaaaaagtttggtgtaaaagaaatggtgctgaaggtccagcaaaccggctatacagggttttattttcgcgtgctggaggagggcagggtgtctcccggcgcgaaccttgaattgctgtccagaggagagaagggcatatccgtccagttcgccaaccgcatcaactaccatgatgcaaaaaatctcaccgccattgaacggattttaagtgaggctgcactatcggaaagctggagagcgtcctttatgaaaaaaaaggacaggctgctgccggttgaatagaaaaaagccgcgcatatcaacgtgcgcggctttgccatatttaagattgttttttctttgtttcaagcaggttggcaagaaaataggttttatagctttgaagctttcttccctcatggtgcgtgatcccctgcttttttagttctgccacataccagcctttactgccgtaatgcatgtcagaaaactcctttccctatctgatttcgaaacgattggcattgtaacatctataaaaagatgctgaaaagagatgcggggaaaactgagcctttcgaactagatgtgcgaatgttcttctgtatgtatatgcggagcaaaagccgaatatgatttaatggccggttagtttgatcatgacaacgccaaatgtcataatggcgaaaacaatgccgatatatgtgagcatcccgttttttttcttaacgccgtaaacggttataatgatgccttcaatgaaaaaaatgatgccgaaaataataaaccacatgcagataaaggctcctttcacagacataatagtagtgtagcatatctgaaagagccgggctgtgataatatcaagaaagccgggcgcatatcgcccggctcatgttttattgtttatcaaccaatttgaccagaagctgtgccaaatgttctttctcatcttcgtccgcaacgctccaaagctcttgcagcagcatttcttcaccgttttgcggctcttcatgctttgcgaggtagtctcccaggatcgcagcgctttttacaagcttgccgtcatccaatcccagctttttgcctcggttgacttgttttttcaggtagcctttaaattcatcaaagtcttttaaaatgtcttcttttattgtgccatgcatcgcgttcatttcgttttcaatttggattttttcttgatctctgttcattgcaagacctcctcgtgcagaataatgatgttttacctgctattggaggaggttaaacctgccggaagcccggaatgtgttttacagtttcgtcaggataatcggttcatcttttgtgatgacgatcgtgtgttcaacttgggcaaccatgcttttatccggcgtcttgaacgtccagccgtctccagcttcaacaatcgtttctgctttcgttgaaataaacggttcaagcgcgatgactgtgccatttttgaacagtgcgttatcaaacggatcataatagttcatgatgtggttcggcgcttcatgcaggcttcggccgattccgtggccggtcagggttttgatgacggtaaagccttgagagcgtgcttcatgataaacggctcttccgatctggttttggcgcttgcccgcttttgcctgctgaagccccttttgaaaagcgttttccgcgcattggcaaagcttatgaaggcgttcttctccttcaccgagcacaaatgagatgcctgtgtcggaatagaagccgccaaattcagcggagatgtcgatgttgacaaggtcccctgcttttaaaattttggatgtgcttggtatgccgtgagccacttcatcatttacgctgatacatgtcacacctggaaaatcgtattccttctcaggagctgaaacggcgccgtgctcatcaagcacagcttttccgataaggtcaaggtcttttgtgctcatgccgggctctgccttccgcttcatttcttcacgcgcaagcgcgacgattcttccgatttttttcaggccttctaattcttgatcgtttgttacaatcatctgtcattcccgctttctttttaaataatctagattaagcttaccacaactgtcttaaaaataggaaacacacggacctgggaaaaaagaaatacccccgggaaaattggtatagatcactagatatcttatatggtatatttgaaaaaaaagggtatgaggggatgggtatgctttcatttttacaaaaactcgggaagtcatttatgctcccgattgcggttctgcctgcggttggaattatccttgcgcttggcagagaggatgtatttaatatcccgtttgtctatcaggcggggacggcggtttttgatcatctgccgcttatttttgcgatcggtattgccatcggcatttcaaaagacagcaatggggccgcgggtttatcaggggcgatatcgtatctgatgcttgacgcggcaacaaagacaattgataaaacaaataacatggcggtgtttgggggaattattgccggtttaattgccggttacacctataaccgcttcaaggataccaagctgcctgaatatctcgggttcttcagcggcagacggcttgtgccgattttaacagccattattacgatcattttagcgggcatattcggagtcgtctggccgccgattcaatcgtgtatcaactcgtttggagagtggatgctcgggctcggcggcatcggggcaggcatattcggccttttcaacaggctgttaattccgcttggccttcaccatgtgctgaacaatattttctggttccaattcggagaatataacggagtgacaggggatctggcgcgctttttcgcgaaagatccgacagcgggcacatatatgaccggattcttcccaatcatgatgttcggtcttccggcggcgtgtctggctatgattgtgactgcgaagccgtctaaacggaaagcgacggctggaatgatgattggatttgctttaacagcgtttatcacagggattacggagccgattgagtttgcatttatgtttttatctccgcttttatacgctgttcacgcggtcttaaccgggttatctttatttatcgtcaactggctcggcatccgttcaggcttctctttttcagccggagctatcgattatgtgctcagctatggaatcgcagaaaaaccgctgcttctgcttttggtaggtatatgctatgcggcagtatactttatcgtgttttatgtactgattaaggctttgaatttaaaaacgcctggacgggaagacgatgatgtggatgaagtgctggatgaaaatactgttcaggatgtaaatgaaaacatcatgctgaaagggctcggcggaaaagaaaaccttcaaaccattgatcattgcgccacaaggctgcgactgactgtgaaggataccgctttggtggatgaagcgctgctaaagaaagcaggcgcaaaaggggttgtcaaatcaggggggcaatcggttcaagtcattattggcccgaatgtggaatttgcggcggaagaattgagggctgctgtcaaataaaaaaagcggagagggcaacctctccgctttttcttatttatcttcgttatcctttgacgtttcggaagaatcttcgtcatgttttgtgtaatcataatcagaaggattcaccttcttaaaacctttcggctcgtagaaccgcagcaggtctccgtttatgattttatcggacatttcaagttccttcttgacgagcgagtcttctgacttgtcgacttcggattcatcgagttcttttccggttttcgtgtcgtaatacttaccggatattttcgtgtacttcggtgaaataaagtctccgtttcggaacggaatcacttcacggtgttctttcgataaaatatcagaaccggacatcagatagtccttcgtatccactccgagcagatgcagaatggtaggagccacatcaacgtctccggcatatttatgaactttctcgcccttcacgccggcagcgtggataaagagcggcacccgttgaagctgggcgttgtcgtaatcagtgatttcatccttgccaagcactttcgccatcgctttattgtggttttcagagatgccgtagtggtctccgtacatcacaataatcgatttatcatataacccgtcttttttcagatcattgaagaattgttcaatggactgatcaaggtaatgggctgactggaagtagttatcgacgacagagtcaccaaagtctccagccgggaagtctgtatccccctcatccattccgaatgggaagtggttagacagggtaatgaacttcgtatagaacggctgcggcaggctttccagcagcggcattgattctttgaagaacggtttgtctttcatgccgtagtttttcgtgttttcttcgttcatgtcatagtaagcagaatcaaagaatttatcaatgccttccgccttgtacatttcgttacggttccagaacgtctgcgtgttcccgtggaaagtagcagatgtgtaattcttagacttcagaatcgccggaacggattgcagcgtgttttgcgctttgtttacgaaaactgaaccttgagccagcgggtacagagagttttccatcataaattcagcatcagatgttttaccttgtcccgtttggtggaaaaagttatcaaagtagaacgtttcgttatcatgtgccagtttatttaagaacggtgtcacttctttgccgtcaattttatagtcgatgataaatgactgcaaagattcaagtgaaacgtaaatgacgttttttccttccgctttgccgaaatacacgttattcggcacatcgtaattggctttcatgtagttttccacttccgtcacgtcgctggaatcggcaagcgcgcgctggctgttggacttgatattctgtacagcgtcataaatcgtgaaattgtatgttcccaagtatttcacaagatagttccggtcgaatgatcttgtcagcaattcaggacggtctgattccgcaactgccagattgatcaagaacacaagaattgaagacgcaaaaataattcggaacgattttttgcttgacgtttcggcaggcttgtttactttgatcgccaagatgatcaggatgatcgtatcgataaagtaaaaggcgtcagtcggtctcatcagcgaaaatgcgctgtcaccgagttggccgccgtttgttttagcctgcataatgaccggaattgtaataaaatcattgaaaaatctgtagtacacaatgttggcgtacagtaaaaaagacattaaaaaatgaatcactataatggctgtctgctgtaattttttcttgaacaagagtccaaagccaagaaagaacaagcttgagctaagaggattcacaaaaagcaatattttttgtatcgtgttgtctattcctaagttgaagttcaggacataaccgacatacgttttgatccataacaggacgaccgcgattaagaagaaggccagtcctctttcttttataaatgttttcattgttacactccttttttccgatccagttcgagcgaaacgatagaaaaaacgaacgtatccaatataacacgaatcagcagattagaaaagtgaaaatcgtatgatggagaaagtggcgaaaaacgccgtcgaatcaacgtttcgctttgatattaccaaatgtaaaacaaggtatctttctagaaatagaggaataaaatggtacattgggaattgtatgataaaatataaggtatagataaaaagaggtgaaatgatggatttttcccatattgtgtctgaagataaaattaagcgcgccatcaaagacggggactttcaaaacctcccgggaatggggaagccgctgccgaaggatgacgcggcacacttgccggaatcgctgcgcatgggctatcgtattttgaaaaacgcgggaatggcagaggacgagggcgcgctcaaaaaagagcttatgaccatcgaccatttaatcgaaaagtgctatgacgaaaaagaacgcgagcaattaatcagaaaaaaatctgaaaagcaattgctgcttgataagcttgtcgacaaaaaaggcatgttttcaaagccagcatccgctttttataagaataaagtatatgatcggcttggacgaaacagaccttcttccagctgatttgtcttgtctgcaggatggcgattgataatagccatcctttttatgttccaagttctatgtcaaaaggtttatgtttttccatctatgggaaatgattcataaacgaaaaaagggtgatgggatggaacgactattagtatggatagagcatatatctgattggctgtggggtccgccgctaatcatcctgctgacggggacgggcttgtatttcactattttgctgaaaggttttcaatttcgctatcctttatacattttcaaacagacaatcggcagcgtaggaaaaaagccgaagggagagggcacagtcacaccgcttcaggcattgacctcagccctcagttcaacgatcggtgcagcgaacattgtcggtgtgcccgccgctattatgtttggaggaccaggagcggttttttggatgtggcttattgccttatttgccatggcgattaagttttctgaaagtgttcttgctgttcattacagagaaaaaaatgagcagggtgaatacgtcgggggaccgatgtattacataacaaaagggctgcgcatgaaatggctcggcgtattcttctctgttgcgctgattgtggagctgatcccaagcattatggttcagggaaattcggtttcagtctcgcttgccgagacgttttctttcaataaaatatacgcaggaatcggaattgcatttttgattgggttagtggtgataggaggggtaaagcggatcggaaaagtaacagagtttgtcgtgcctcttatggcaggggcatacgcaggtgccggtctcctgattgttctcatgaatctatcatcagtgccggcgtttttctctctcatcttttcaaatgcgtttacctcttcttcagcagttggagggttcgcaggtgctgcgttggcggaaaccgttcgctggggatttgcccgcgggctgtattctaatgaagccgggatgggaacagccccgattgcacatgcggcagcaatgactgatcatcctgtgcggcaagggttttggtctgtgatcggcattgtcattgacaccttgatcatctgcacgaccaccgcttttgtcgttcttgcatctggtgtctggacagggaagaacgcctcaattgacccggcagcactgacgacggctgcatttcagcattatttcggttctggcggagggtacttcgtttcggtttccctagtcttctttgtcgtatcaaccattatggttgtcattttttacggcgtaaagcaagctgaatttctgttcgggcggctggcaggacacgtgattaaattcgtttatttagcggctattatcattggtgccgcaggcggagcaaaagccatttggggctttttggacttagcattggcttttattctcgttccaaatgtgattgcgctgttgttattgagcagaaaggtaaaagcgctgtacaccgaattctttacatctgaacagtactacctgaaagatataagaaaaacaaaacagaatcctgtttatcaaacaaaagaaactaaaaattcctagtgctttgctttggcgctgaacaacgctttgctttttatgatcaaataaatgagtaaaggcagcaaaagagaaatcactacattaatgattggtttgattctgttaaagtcgattagctgatttgtatttaaaaagaaccaaaagccgcatacgactgagaacatgccggttggtgtatacatggctttcgggtcgatttttgagtgtaaaaacgaaaggccgtataccacgatatatagggaacctgctatcttcaccataatgactggaatccaaaaagccgcgatgatcaggtctgagcgatccagaaaatccgtaatgcggatctgcctgatgaccatataagcaggatcaaagaaagtagatgtcaggttgggaccaaagacagaaattgaagaaaataacatcacggccagcaataaagcgcccagcagtatcgcgaaaatggtgtattttagcgggacgctccggtttgagaagagaagcggaaggataatcaattcccccattgtcccaaacgcgtaatagcctgattgaaggtatgggattagaccttcaaaaacaggtgtcaagttttgaagctcaatttgtgtggccagcgtaaatggaaggcacaagaccaggatgccgaatggaaataggaatatctgcgccattctggtcaatgtttcttttccctctctggcaatacagatcgccacaaagataataacaccgccaagaacagccattggtgttcttgggagaaataaaatgttaatcaaattgatgaaaaaacgtatatcatgagcattgattaacaggaaatacaaagaaaacagtaaaatgataatccggcctgcgattggtgaggaatcgctcagcagctcatagatatttttatcctgatgctttttcatcagcctatgcatgagccagagtgccggaatcacgaggacaacgccgaggatgtagctgtgccaggcattttgtttagctgattcgatcatgagaatcggagcatgctttaatccgactgctaacgtatacagagctccgaaaaataatccttggtatgcagaggtcttgtccataaagcacatcctttctgtcatgttcaaaacggaatatatttaaacaggtgccccagccgcggaagcaggggattcactctcatataaatccatagaaaagcacttcctgcaatcagcaggctgaaggcccattttgttagattgttagcggaacgaaaattcttccattcatatgcgtatatggcaatgcacacaatcaatgtctgtacgatatagctgatcatgctgacgcacctccattaatggctgatcgttttgtataggacaccgccctgctcaatcgtcacaattgggacgacgtgaacctccatatccttatatacctcttcccattcctttttcagcagattcttcgtggttgccgtgcttctgatggtcctgtcttgaaagccggccgggtccgcctttagcttttgcaaacgatgaacggtgctgatcacgtccttctttatggttctgtttagtgctttttgaatgatgtaatactggtcattttctctcgtctcataggttgattggttttccataataattcctttggctctgatctcgattgtcattgacagctttccgtttttttcagcggcatgaaaggatacattggacttttgaagctgaatggatgcttgtcccatttgattcggcaggtctactatgaattctggctggcgggcttgattcagcaacatcagggctgctgtcatgtgtacatctttgaaaatatccatcaatctgtcctttttaaagatcgcaagcccgtcaattttcaaattagatttgcctttccctccaggttttgttttagatgcagagatgaccggtgcatacggatcactgcctatttctactagatcagacatgaatctgcttaagaaaacgggccggctcgttgcgataatggccagctcccgaatcatttccgccggaaactgttcaagctgaacatcggtgtttaaaatgtcccgcgcttctccccggctgactaaaatgagcgccgttaatctgttctgcggatttcgcgttaaaatatcaaagactggggcaacgccgtctctcgccatatcctctccaataatgactgtacgtctgtgggacgtattgattgtccgtgacaaggaggtttgcagcttgttgttcgcttctctgatcgtagtgccggaagctgaatcaacataccatgtttttgaaccggcagttccgccgccgccccctgtttgtccgcctaattgaccgaccaagggaatctgcatggccactcgatactgatcttttttcttatcaatggctgagctgacaacaaatgcaatgtcattgatttctgtccggtcccagcaccccgttagaaggatacaaatgagaagcggcaaaacacacttatatattgttttcttcatcttttgggtcctctcttttcgctcccttctgtccgttgccgcgcgaatacgtgcccggccttctggtcatcgtccaccaaggcgccctgacaaaaatatcttttacttcatctcgtttaaacggagaaatcccggataaataaggaataccgaaagattgcagcttgcataaatggagcactaagataatcgtgccaagcataatgccgaaaatcccgaaaatactcgccaaaaacataagcgggaaacgaagcatcctgatggagatagctaagttaaaccgcggaattgtaaatgacgcgatccctgttaacgatacgatgatcaccatgggggcagacacaattcccgcttcaacagcggctgtcccaatgactagggccccgagaatactgacggtctggccgatggttttcggcaggcgcactcccgcctcacggagagcctcaaaagaaatttccataatcaatgcttctatgatggcggggaaaggaatcggttcacgagcggaggccacactgaacattaagtttgtcggcattaagtcctgatggtatgtaataacggcaacataaatagccggcaaatataaagcaacgaataaaaacatatagcgaagccagcggattaagttagacatcaaataacgctcatagtaatcttcactggcctgcataagctgccaaaacgtaatcgggcctgttaagacaaagggcgtattatctgtgaaaatggcaaatcggccttcgagaagctgggcggcgacagtgtccggcctttctgtgtattgcagctgggggaatggcgagtacgtgtcgtcttcgataaactcttcaatatatccgctttctaagacagcatcaatctttatctttttgattcttttttttactttgtcaatgacctttggatcggcaagcccgtcaatataggccaagacaacatcggttttggttttcgtgccgattttaaacgagatcattttaagctgaaacgttttgacgcgaaagcgcacaagagcggtattgaccctgaggctttcagtgaagccctctcttgaccctctgatggtcgattctgttatcggctcttcaatgcttcttctttgtccgccttttatatttaagatcaggccttttgagtgcccgtcggcaaataaaaccgcgttcccctcaatgatagatgcagccactttactcatactcgtttctgttgcaacacttgaaattgatagagtattttgcagcgcctcttcatgttcatctatttgatccgtcaaatgcgttaagaaagggcggagggcgtgatcctgaatatgttcagattttacaattccttcgatataaacaataaatccgcacagcccgtttccaaagtcaaattgtctaaatacgatgtctgagcagccttctgttaataaggtcagattatcgaggttttccttcaaattgggagagatcggtctgtcctgattgtcttcaagctctttgatgagctgaagcgctttgtcgcgtttattcatagaggctcaccctgctttttaatgtcatattcaataagtgcttgtgacttttagggtaaccttgtctgtttcatatattccagactaggatgaaagcgctataaaaaagtgttgactacctgtatatacaggaatacaatatgattataagttgtatatacaagttataaaaacggatacggaggggttggcatgggggaactgaacaaatcggcacgtcagattgtcgaagcagtcggcggtgctgaaaatattgcagcggcaactcattgtgttacacgtttgcgttttgctttaatagatgaaagcaaggttgaccaagagatgcttgatcaaattgatgcggtaaagggatcattctcgacaaacggacagtttcaggtcgtaatcggccagggaactgtcaataaagtatatgctgaactggttaaggaaacggggattggcgagtcaacaaaggatgaagtgaagaaggcctcagaaaaaaatatgaatcctttgcagcgtgctgtgaaaacgcttgcagacatttttattccaatattgcctgcgattgtcacggcgggtcttttaatggggatcaataacattttaacggcggaaggcattttcttcagcacaaaatcgattgtgcaggtttatccgcagtgggcggatcttgctaatatgattaacctgattgcaggcacggcctttacgtttttgcctgcgttaatcggatggtctgcagtcaagcggttcggcggcaatccgcttctcggcattgtgctcggggttatgctcgtgcatcctgatttgctgaatgcgtggggatatggcgcggcagaacaaagcggagagatcccggtatggaatctattcggcctagaggtgcagaaagtcggctatcagggccaggtgctcccaattttgcttgcttcttatatgctggcgaagattgaggtatttttaacaaaacgcacacctgagggcatacagctgctcgttgtcgcaccaattacgcttctcttaacgggatttgcctcttttatcattatcggcccgattacatttgcgatcggtaatgtactgacttcagggcttatctcggtgtttggttcttttgccgcactgggcggtctgttatatggcggtttctactcagcactcgtgattaccggtatgcatcacacgtttcttgcagtcgacctgcagctcatcggttcaaagctcggcggcacctttttatggccgatgctggcgctttctaatatcgcacaaggttcggcggctctggccatgatgtttatcgtgaaggatgagaaacaaaaaggcctctccctcacatcagggatttctgcttatcttggcattacagagcctgccatctttggggtgaatctgcgatacagattcccgtttatcattgcaatggtcagctctggcctggccggaatgtatatttcttctcaaggtgtgctggcaagctccgttggtgtcggcggcgtgccggggattttctcaatcatgagccagtactggggcgcgtttgcaatcgggatggctattgtattgatcgtgccgtttgccggaacatacgcgtatgcgagattcaaacataaataacaaatggggagcgggacgtgttgaacgttcccttttcccattttcaatttaaatatggtggtggagacagatgaaaacagaacaaacgccatggtggaaaaaagctgtggtttatcaaatttatccgaaaagctttaacgatacgacgggaaacggtgtcggcgatttgaacggcattattgaaaagctggattacttaaaaacacttcaggtggatgtgctttggctgacgccgatttatgattctcctcagcatgataatgggtacgatattcgtgattattactcgatttatcctgaatatggtacgatggaggattttgagcggctagtgtccgaagcacataaaagagacttgaaagtcgtcatggatcttgttgtcaatcatacgtcaacagagcacaaatggtttcgcgaggcgatctcttccatagacagcccgtatcgtgatttttatatatggaaagacccgcaggaaaacggttctcttccgacaaactgggaatcgaaattcggcggctcggcatgggagcttgacgaagcatcgggccaatactatttgcatctgtttgatgtgacgcaggctgatttgaattgggaaaatgaagaggtcagaaagcatgtctatgacatgatgcatttttggtttgaaaagggaatagacggctttaggcttgatgtcatcaacctgatttctaaagatcagcgctttccgaatgcggaggaaggcgacggccgctctttttacactgacgggccgcgggtgcacgaatttctgcatgaaatgaacgaaaaggtgttttcacattatgacagcatgacggtcggtgagatgtcttcaacaaccgtagaccactgcatccggtatacgaatcctgacaataaagaacttgatatgacattcagcttccatcatctcaaggttgactatcctaacggcgaaaaatgggccttggcgccgtttgattttttgaagctgaaggagatcctatctgactggcaaacggggatgcacgcaggaggaggatggaacgctctgttctggtgcaatcatgatcagccgcgcgttgtatcaagatatggagacgatggcgcatatagggtgaaatcggcgaaaatgcttgctacggccattcatatgatgcagggcacgccttatatttatcagggcgaggagctggggatgacgaatccgaagttcactgacataagctcctatcgggatgtcgaatcgctgaacatgtataacgcctttaaggaaaaaggaatggctgatcaagatattacagccattttacaggcgaaatcccgtgacaattccagaacccccgttcagtgggatgctacggaaaatggtggttttacaacgggcacaccatggataccggttgcaggaaattaccgggaaatcaatgctgaagcggcgctgagggatcagaattcggtgttttaccattatcaaaaattgattcagattcgcaaaatgtatgacattgtgacagagggtacgtatgagataattgcaaaggatgacccgaacatttttgcgtatctcagacacggcagcaatgaaaagctgctcgtgatcaataatttttacgggacagaggcggcctttacactgccggactctttagcgcctgacgaatggaaggcagaggtgctgttgacgaacgatgaagcaagggaagggcttcagaacatgacgcttcgcccgtatgagtccattgtttatcgtttaacgaaaccgtgttaaactaagctgggtggtccataatgaaggtgaataaattcatcacaatttataaagacatcgcacagcaaattgaaggcggccgatggaaagcggaggagattcttccgtctgaacatgagttgaccgcacagtacggtacatcaagagaaacggtccgaaaggcgcttcatatgctcgcgcaaaacggttatatccagaaaatcaggggaaaaggctccgtcgtgctcaatcgtgaaaaaatgcagtttcccgtttcgggccttgtcagcttcaaggagctcgcgcaaacgcttggcaaagaaacgaaaacaactgtacacaaattcgggctggagcctccgtcagagctgatccaaaaacagctccgggccaatctagatgacgacatgtgggaagtcatcaggtctagaaagattgacggggaacatgtgattttggacagggattattttttcagaaagcatgtccctcacctgacgaaagaaatttgtgaaaactccatatatgaatatatagaaggagagctcggtctttcgatcagttacgcccaaaaagaaattgtcgccgagccgtgtacggacgaggacagagagctgctcgatttacgcggctatgaccatatggtcgtggtgagaaactacgtctttttggaggataccagtttgtttcaatatacggaaagcagacaccgtctcgacaaattccgatttgttgattttgcgcggcgggggaaatgagagaggcgcctgcctgcggcagcgcgcttttttgtttggtatcaaaattgatactatccaacaaaaatgtgcgtacttttactttttatcataatggctacaatagagatgtgagtaatctaaaggagaggtgttttacatggcagatctaaagacacaaattctggatgcatacaatttcaggcatgcgactaaggaatttgacccgaataaaaaagtgtcagacagcgattttgaatttattttagaaacaggaagactgtctccgagctcactcggccttgagccttggaaatttgtcgtcgtccaaaatccggagttccgcgagaagcttcgtgaatacacatggggcgcgcaaaagcagctgccgaccgcaagccatttcgtcctgattcttgcgcgtacagcgaaggatatcaaatataatgcggactacatcaaacgtcatttaaaagaagtaaaacaaatgccgcaagacgtgtacgaaggctatttaagcaaaacagaagaattccagaaaaacgatttgcatttgcttgaaagtgacagaacattgtttgactgggcatcaaaacaaacctatatcgcgcttggcaacatgatgactgccgctgcgcaaatcggtgttgattcctgcccgatagaaggcttccagtacgatcacattcaccgtattcttgaagaagaaggccttctggaaaacggaagcttcgatatttctgtgatggtggcatttggctacagagtgagagaccctcgtccgaaaacaagatctgctgttgaagatgttgtgaagtgggtttaaataaagaaagctgctcgctaagcgagcagctctttttttatgcctgattcgctctattctgttttctcctctgatgtaagtacattgccgttccgagtgcgctgataagaaatccggccaataggatcgagtacatggatgtggctgtgtccggaagcaggccgccagccggaccgtctgttcctgatccgcccgaaccgtttcctccagagccgttagtcggttgagtgccaggaggcgtatcatttcctccgtttccgtcagttggctgttttccgcctggtttgtcggagccgccgccatgattgccgtcatcaccgcctgtcggttggtcggacgggaatgccggcggtttgttgttcgaaccggaatttaagatcgtgtattcgctgaagtggtttgtatatcctgtcaccatatcatcgtcaactgatccgttatctgtctttgtgaaagctttctttttcctgtcgacatgataaatggcagggttatgggcttcttcaatatcaaacatgcgaagcgaaagctgaacgggctccttgaatgattttatttcttttcctttttgctttactgtaaagtcatatacatctgccaatgacacattcaattctcccgtcgacttgattccgattgcagtgtctgcagttttaaggttcgccattggcatcttcatgctgtaccagtagttgaacaccgtcaatgaaggatctgactctctttctttcaaaagtttgacctgatctttttttactttgagattgataggcttctcttgagatccttcatgtgttccataatagacaaatggcgtgttggcatttttagcgtaaatcgcaaatttgtcttcatcaagtgtccagctgccgtcctcctgctttgtcggcaggaatacttctttgatccgtccttcaactttaggagagaccttgtttcctagttttttcagctgttcggtgaaaatctcataatcaacgtagccaaggtcttcaccatgggaggcttctgtaaagacagaatatccgtctcctccggcaccaacaaaattatttgttgccacgcggtaggtatcatccgtatttatagcaactttgtctccgttaggcgattcaattttcacttctaacacacggtgtccaggtttgttgtttaatgtaaaggtatattcgattccggccacctgagggaaagcgccgccgccattttccacattgcttaggccttgttcaagggcttctttaatttgttttccggttaaatcggccacgtaaagcgtattgccgaacggcatcacgttgagcacctcgccgagtgtgatatcacctttgtcaatgcctgctctgatgccgccgccatttgttatcgctattctggcgccggctgcttctttcgcttttgccagcataccgtccgcgatgaagtttccgagattcgtttctttcgtgcgcacatgctcacgctggccgtcaagcgccacatccgtgtagccgactttttcattttttacgtcctctaattcatttttgaactgatcgagctcttgttttgcttctgggttttcttctgtatgttcatcaattggcagcacgctcagatttgatttatctgtttgcacaacgcctttttcatcaaacgcgacatcaacgcgccccaagaattggccgtattcttttgcctgtgccacgatcgtcggttcttcgttgtttacgacctccattttgtcaacgagggtgtgagtgtgtccgccgatgatcaagtcaatgccttttacttttttggctagctcaagatcacggttatgaccgatatgggttaaagcaataattttatttacctgttcttcttcctgaatcgctttgacggtgttttgggctgtttcaaaggcatcattgaatacgatgcttttgcccgggcttgatgtggtggctgtatcttctgttgtcaggccgaatacggcgactttctccccgtcaacgtctaacagaatgtaaggatggatgccggcctccttcttttcacctgccgtaaaggtttgcggctttttgacaaatgatttcagcttggactcatttgtcacatctacgtttgcactgacaatcggaaattccggcgcttcaaagtgatagcggttcgccggatcaacggttgcgctgtttccgcttagaaaatcagaaagcactgtcgggcctttgtcaaattcatggtttccgaaggtcatggcgtcatagcccatcatgttcatcattttcagatcggccaaaccgttccatttagtaaaatacagatcgccggaaaacacatctcccgcatcaaggagaatattgtgatttgtttcgctgcgtacttcgttgattttcgtcattcgtctcgctgcatcatcgagatgtgcgtgcgtatcattggtgtgcatgacggtcaggtcccacagtccgtctttaggaggatctggatttgaatcatcatcgaattgcagcttatacacaccatagccttcattcgcagacttgcctacataagcgacatcgtctgctttatcggcaaatggcttggccaaaagcgaggattcaaacgtcagattcgtgccggaaacaggcgcgattgaccagttgttgtctgcttttggattgactgttttttgttcaataatgtaatccatcagcacctgcctgttttcaaccgcagagccgtggacaattttattgctcgtcagatgagggaacccgccgcctccggacgcacgatagttattggtgactacgagaaattcctggcttgggctgatcggcttgccttcataggaaaggttgatgatacgggatgaatccgcattgatcacttttccgttctcattgtatttagccggttttgtcacatcgacctgatatgtgacaccgtcaatcacgtcaaaattataggaacggaaattctcgttcagcaaggcctgatcgccgcctttggctggatcaatttgattgaattggcctgccgacatctccagccagtccttcacttcgctgcctgtcagcttgacgatttgaacagtattatcgtaaaggtacaagtcaccgacatttttaatcgcaagatctccggctggaatgtttgtatagtaattggctccatttctgccgcctgctttaaacggcgctccagcggataaaatcggcaggttcttgtactcggtatccttcatttctttttcggcataccatttttgcgcgtcagtcacgatctgaatggaaggatcatctttgacctgtgcaaagaagctgttaatatctgcttcggttttgccgactggctttcggacatactccagtgtgttttggtgtgtttgctgaatggtgtttgtaacggtttcgtttcttgatgtgacgttgccagcaatagattcaatacttcctttggaatctgctaccttccatgagccgtccgccttttcaagcttgaggtcaatcacgcctaaatatttgccccagctgcttggcatgacgacaggaatgccgttaattgttcccttttccacatcaaattgagcaacacccgcatactcggaggaaggaaagagtccgtgctgatggcccgagataatcgcgtcaatgcctttcgttttagtggcaaggtcaaacacggcgttttctgcgcctgatgattgtgactgcttttcaatgccggtgtgggcgagggcaataatgacatctgcgccttccgccttcattttcgggatcgtttcattggcggattctacgatatcctgcacctgaacttgcccctcgagattctttttgtcccatgtcatgatttgcggcgggacaaagcctatgtagccgacttttactttctgctcattaccgttttcatcaatgagggttttttcattaatcatatacggcgtataacggttttcgccgctagttgttttgacgttggcatttacaatcgggaaatcggctcctttgattgtgccgtcgagaaagtcgagcccgtagttgaattcatgattgccaagcgttccggcgtcgtatttcagcgcattcatgacgctgataatcggatgggttttcgcgccggagataatatcgtctttttgatatttcaccgcgtattcacccagcggattcccttgaatcaagtcgccgttatccacaagaagggtgttagggttttgcttgcggtgcttttggatcaattgcgctgttctcgccagaccgaaatccgccgtttctttgtcgctgtagtaatcgtaatccatcatgttggcatgaatatcagtcgtagccaaaatactcagatgcacctgaggagccgcgctttcttctgcatgaatgggtggtgttgggaggattaggctaagtatcataattgggggcaaaagaatacggagaatgtttctgacgtgtgttcgtcttttctgtattctcaccagttctccacctttcaacgaaatttgtgttacagctcctattgtaagaatattttgtaactatttgtaggtgtttctttatgattattgtaaaagggagaaaaatgagtattatgtatcagtatcaagcgacaaatactgggtatttatgcttatcgtttgtcacaatcgcggaatgtttattttagtgtggctggggtagagtgttttatgtagacatataaagcgggaggttatgaatcatggggaaaaaaattgcagttgttttaacagattattttgaggacagcgagtacactgagcctgcgaaagcttttaaagaagcgggacatgaactgactgtcatcgaaaatgaaaaaggaaaaacagtaaaaggcaagcagggaaaagcggaagtgacggttgacgcgtccattgacgacgtaaatccttcagactttgatgcgcttttgattcctggaggattttcaccagaccagcttcgcgctgacgatcgtttcgtccaatttacaaaagcgtttatgactgacaaaaaaccggtattcgccatttgccacggcccgcagcttttaatcaatgcgaaagcgctcgacggccgaaaagcgacgggctatacgtccattcgtgttgacatggaaaacgccggtgccgacgttgtggacaaggaagtggttgtttgccaggatcaattggtcactagccgcacaccggacgatataccggcatttaaccgcgagtcattggcattgcttgagaaataagaaaaaacggacgcccacgggcgtccgtttttttgttgcttaggcttgagcacctgtcagtttcttgtacctgtaatacaagaaagcagctgcagccgttccgatgaccgcaatgccgaagtcgaatatgaaaatatgagcgatgccccccgcttttgcgataagccctgttgcaatcggcagcagaatcgatgcaagacttgaagcggtcgctacaattccggtaacggttccttttcgcttccagaaaagctctgtcattaacgtaatggtaatttgaaacacacccgcagttgaaaagcctaagaaaaaggcagtgatgtccagcacaactgggatatgaacggtcagcatgactgcgagcgtacataaagtaataataggatataagagcgttatgaagacaggtttgacccatctattcagcaaaacggctaataataaaacagatgccagagatcctatactataatagctcagcaattgtacagatgctgattcagctaaaccggctgctttttgcgcgtagctcgggagccagatttgagaaaccgtaaataaagccgtggatgtaaaaccgatgataatcagtgcggtgccttctttctgaaaaacgggttcagacaagaaaacgggagattcctgttggccgctattagttggtttcttatgttttttaggaaacgaaagcgttgataaataaataatattcaggagatagaccgctgccggcagataaaaagcaaatccgtaaaacatgctgtggtctgctaaaaatgtgatcaaaagcggcaaaagtgcggccccgacagacataaaggccttgaccaagacattcgccgaaccggaagcagtcggaaagagctcagttagggccggatatgttccggcatccatcgctgaatttgcgactccggctaataaggcgaacacaaacgccagctcatagctcggtgataaaggaataccgactaaaaagacggccataattcccgcagaagcgacaacaagcggctttctgccgattttatctgatagaactccggaaatgccgtatgtcagcagtttgccaaacccgatagcggcaatgacataactgatgccggtcggatcggtattccactgttttgttaatgaagacatattggatgcgagaatgatgttgaccatccccagaaagaagtagttgatatacattccggatgctgttttgatagatgtcgtttgcatgcttgtactccttcaaatcttattcgaacactttgctgttttggtttggggaaatgataaaaaagactcgccgagtttccggccagtctccattatttacgaagcgaggctaattcttgagcaatcgcctgcatttcacttgggctgaatgattcttttttcatcaccatgctgtgaaggtacgtgaggtcttcaatcttctcatcactgaaatcctccgctttgattacgccgacgttcagcatgttcagcttttgggaaatctcttcaatcatttgagttaatgtttctgtatttgggctggacaaatggttccatcctttctatgcgcaatataggtatgttttattctaacagaattccatcagaaaaaaaccctattctaaaagcaggctgttcattccaaaaaagtgaagacatcagttgaaaagaaaatgaacatcctactaagatattcatgaaggtttctttttagagaaataggggcaaagaatagggaggttggacaacatgataagcgtgttatttgtttgtttaggaaacatttgccggtctccgatggcggaagcgatttttcgggacctggcagccaaaaaaggattagaggagaaaatcaaggcggactcagcgggaatcggcggctggcacatcggcaatccgccgcatgagggaacgcaggagatattgcgcagagaaggaatcagctttgatggcatgctggcgcgtcaagtcagcgaacaggatctggccgattttgattacatcattgcgatggatgcagaaaatatcggaagtctcagaagcatggcgggatttaaaaacacttcacatatcaaaaggcttttggactatgttgaagattcagatcttgccgacgttcccgatccttactacacagggaattttgaagaagtctgccaattaatcaaatcgggctgtgagcatctgcttgcgtctattcaaaaagaaaaacaattgtgagtgaaaggagaatttgcatgaacaacgaacgtttaatgctgaaagggatatttctcggagctgcggcaggtgcggcgttatcactgctccataagccgacaagacaggcgtgcggcatgagatggctgacatgcaagcataaactttcactgtacaaaagcaatccggagctgttaaaaaacactgtcatcacaaaagtggatgaggccaaaaaactcgcccaaacgctttcaaaggaagtcgactttgtgaaccagcaggtgaaagagctgaagaaaacaacgccgcaagtgatggaactcgtgcaagaaacgaaagagcatttttcaaaaaaatgatcaaacatgcgaggtgagacgacatgagttttttgaaagagcttttcagcagatacacccttcatgaaggacaaagtaaatcagcggagctggcgtatttttttctattgtcactgtttccgtttttgatttttatgctgacgctcaccgcgtatcttccgctttctaccgatgatgttttaggagtcatagaacaatatgctcccgccagtgcgatgtcactcgttgaatccattacccatcaaaccttaaataatcgaaatggcggtttgctgtcattcgggattatcgccgcattatggtctgcgtctaatggaatgaacgcgatcgtccggtcgctgaaccacgcgtatgatgtggaagaaaaccgctcttttatcattgttcgtctaacctcgatttttttgacgattgccatggtatttacgattttagtggctttgcttctgccggtatttggccgggagattggaaggctcgcttctgactttgtcggcgcgtcggatctgtttttatccgtctgggccgccattcgctggggtgtcagcccgcttgtgcttttgattgttttttccgcgctgtatgtgattgcgccgaacaaaaagctgtctctccggtttgtcatgccgggtgcggtctttgcgactatcggctggatcattgtcagcacattgttttcattttacgtcagcacgtttgcgaactatagcgccacttacgggagcatcgggggaatcatcgttctgatgatttggttttacttgagcggcattttaattatcctaggcggagaaatcaacgctcttttacataaacgtaaaaagcttcctgatgaaaatccctaccattagcgcaccctataaacgaacttcggttcaaaaagaagtcggggggatatcgtgatgaccaagcatacgaaaaaaggcggaagccataacaaacaaaattcgaaaagcaaatcgagcaataaaacaagcggaagcgccaacggacaaaacggctaccattagcataaaagcctcctgacatgatgtcgggaggctttttgattaagaagatgaagaataggtttcagccggtgaccagcttttcggtttgcccagcacaagggccagccacacagcgctaagcgtgagagtaatgaagtagaacaagtttgcgctttcaaatgtctgcatataccagccgccggcaaccgggccgaggatgctgccgagactgaatgtaatgccgcaaagcaggttccccgccggcaggaggtgaggcggaagaaggtctgtcatatagctgatgccaagtgtaaaggttgatccgactgccattcctgcaataaaaaagcagccgccgatcacgtaaggcgaaggaaatacaccggcgatgaaaaagcaaagagccccagtcagcaaaatcaccagcagcacattccgcctgccgtatctatcgctgaggatgccgagcggaaactgaaagataatgcttccaatcgcaaatgcgggaaggatgatcgctactgcgtctactgatatccccaaacggagcgcgtacaccggaaggcttccgttcagcgccgtttccagaaagccgtagccaaatgtaggcataaaggcaacccacccaaacagcatggcctgataaaatcgcctgaaactattgtctgatttggtttcatgaggactggtttccgggtatgcattttgtagaaagaaaacaaaaagccacgcaaacagactgatgcagccggacacgataaaaggaagcgacggactcagcttgacaagcggcaccatgaatgggcctgcggcaaagccaaggccaaaggaaagcccgtaaatagacagatttctcccgcgattttgttttgatgacatggaggtcacccacgtttgcgtagaaaagtgaagcatgtggtcgccgattccaatgaacaggcgaagcaggaaccagacccaaactgactgaagccaaataaatccgaataagcttaaaatgacaatgcttccgcccatgacgatcagcggcttgaacccgagctttctgagcggcgcttccataaacggcgaagccaaaagcacaccgatatacagcccggtcgcgtgcaggccgttgatagcagcggattctccatttgtttcaaaaatgattgaaatgacaggcagcagcatgccttgtgaaaacccggaaatggatacgagcaagacaaggataaagaaatgaaatcgtgacatcgtgtcagttctccttatatggaatctatgttgatcgtacaatgttttccaaaagcaggcaacctgaaaaaagcctatatcacgctatacatttgccctcgtgtaatcatgaaggtttttgtgaagaataaaaataaaacaagtcataaaaaaggagctatttcaccatgaatcgtatcttttttattttagtggcggccggtgttccgctttctgtgattggcagtttgatgcattggccttccgcggttctatttgcagtttattgcgtgacgattatcgcgcttgcaagctatatggggagggcgacagaatcactgtccatcattgcaggaccgcgtatcggcggtttgttgaatgccaccttcgggaatgcggtggagctgattatttccctttttgcattaaaggaaggcctgacaggaatcgtgcttgcctctttaaccggttcagtgctggggaacctgttgctggtagcgggcctatcgttttttgtcggcggtttaaaatataagcggcaggaatttaatatccatgatgcccgccataactccgggcttctgatttttgccatcattgtcgcctttgtgattccggaggtattctctgttggtatgggaaacgccagcaagctcaatttaagcatcggcatcagcatcattatgattctgttgtatgtggcggcgctgtactttaaacttgtcacgcatcggggcgtttatcagccgaataatgccgctcagactgaagaagaggaagagccggaatggtcagggaaggttgcgacgattgtcttgtttgcggcaacgattgtggttgcatacatatccgaaaacctggtccatacctttcactcggttgctgaacagttcgggtggagcgagctgtttatcggggtcatcatcgtggcgattgtaggaaatgcggcggagcacgcgtcagcgattattatggccttcaaaaataaaatggacattgcggttgaaattgcagtcggctctacgctgcagatcgctatgtttgtcgcaccggttctcgtcatctgttctatcttttttccgacaagcatgccgcttgtatttacattgcctgagctcgtcgcgatggtatcagcggttctcttgatgatcgcgatttcgaatgacggggattccaactggtttgaaggggcgacactgcttgctgcatatgtcattatggcgatcggctttttccttctttaacctgaaaaaatgatggataacaacaaagcgggatgaaaagactaagggaaaatgccatagaaagagtgatatgatgaaaaagctatttcattccacacttatcgtgttgttattctttagttttttcggcgttcagcccatccacgcgaaaaagcagtttaaggttcctaattctgtcgcaagcatttcaaaggaaaacacgtatccgaatgcttcacaggatcagccaatgcttcagccgagcaagctggcaaaggaattgctcgatcattctgaggtgaagattgaaaatccgcatctcatcaaaatgctgaatgaatccaacatatccggcacaccgcttgcagtagggtatcgggcgacaatatttctcgggaaatgggcgctcggctatgaatcaaatgaaacagtcgcaaactgggaatataaaaaaatcaatacaaaccgtgcggataaccgcggcgggaaagaaacggctgaaatgcattatgcccaggaacagcagtacagagtgaagggcggcctgacagctaaagttccaaatgctgaagatgtcaaaagcatgatgatgcaaaaagcaatgaagaaaacgaaccttccgcttgcatttgagacggtcattggggctggcacaaaacgggatcagatttataaagtcgctcctaaaaaaatcggttatttacatgcatatgcaccggctgtgaatgaaaaaggaaaagtgacttacggagaagtgtacttagtgctgaaaggaaataaacgaaaactcgtcgtgaaaaatgtcacgtcacagggcatcggtgcgtggattccggttcaagatcatgtcacatttggctttcagctttcctcactgccaagataaataaaaaactgattccaactcggaatcagtttttttgtttattgggttctctcgattcggaccgcttcctcaagcatttgcacattgttttggtagagctggcgaacgagaacccgtctgactgcaaggctggcactgaaataatcatcatctttcaccatgcctttaaccgtaaattcgacgccgcgattgattttattcaatgcggtgatgccgtggatttgaaacggttctgtcggattgccgaattcatcccgcttcaatgaatcacgaagctcttcattcagcatgtcacatgcctcttccaacacgctgtacacgcggtccggatcttctttaaagctgataagaaaggattcggtaatccgcataaaatcaatattatagttctctatttgtctgacctcgccgttgctgatggtgagcagcttcccgctccattcccggatttgcagcgagcggaggccgatttcctccactgtcccgttgaacaagttgttgacggtgacataatcgcctttgtgcagctggcgttcatatattaagaatacaccagccagcacatctttgatcagcgattgggcgccaaaaccgatcacgatacctgctacgcccgccccggccaatatcttgccgaaatcatgcacaaataaagaaataacgtaaaagataaaaccaattgttgccgtatactgggtgacagaacggacaaggctttcaatcgttttttcctttttttcttcaataaaatccgtccgtttaaaaaatagctgtaccagccggttgatgataaagacaccgatccaaaggataacggcaacgaggagaatatcgacgattttattttgaaaaatctccgtaagtgtttctttcatccgcatctaactcctggcttgacgttttgtgaagtctgtatcctgataataactgtttttgacaagaacattcggtccgaggcaccggacattcgggcagtggcaacttagttccttcgcaagcttggtctctctccacttttcataggcggaagggaggctgtccgtctgaatgttgccaagcggcggggtatcaccgaaatcggtcacgataatgtttccgtcgaaaatgttcacattcaggcgggatcggccgtcagggtcatttcgcactgtgacgtttttcgccgcgcgaagccggcgaagcagcttttggtcgtcttcgtccggactgcaggcataaaacggcagcgttccgaacagcatccacgtattttcatcacgaatatccagcaagcggtgaatggcctgtctcatctctttcaggctgagggattcaagagcgcttgcgaaatcgcttggatacattgggtggacctcgtgacgctgacatttcatatcttctgtgatttggcggtgaatatgctcaatatgcggaagagttcgtttgttcagcatcgtttccgcagataccattactccggcatccacgagcgtgcggctgttttcgatcattttttcaaaatagcgcgcgcgctgttcgaaggtcggttttctgtccatcatggcaaagccgatttcagcaaaatcttcaactgtaccccagttatgagaaatatgtagcacatcgagatacggaatgatccattcgtaccgctcgatgtcgagggtcagatttgaattaatttgtgtccgcacaccccgttcatgggcatatttcaataaaggaacaacatattcttttactgatttcagcgaaagcatcggctctccgcctgtgatgctgatggatctgaggcgcgggatttcctccagccgttttaacagaagatctattggcagagcattcgggtctttaggctgcaatgtatagcctacagcacaatgctcgcatctcatattgcacagtgtcgtcgttgtgaattcaacgtttgtcagctgcatgtctccgtattggtcaacatccatataggcttcccaagggtcaaactcgggcgtaatcggacgcagcttcgtgttttgtgtcatgactatctaactcctttataaatgggcatactaacgctgccaacagttaattttagacctgatttgccaagatcgcaagtagcgcggcgattgaaaaacggcaaaaaatgagctaccataataaaaaatgaatggaggaacagaatggggaacgccgtaaacaataaagatcagcagattgattatttaaagaacagacttgacatgtttatgaacgtcatcgattcattagaccctgaagcaaccgacgttgaagatatagacaggcttatcagcatgcttgatgacctggaagccaaatacgaacgttttaaaaaagattgggaataaaaccgcgtgcccgccgcggtttttttattggcataaagcaacagtataaaacaaagcccctatctgtaaaataagaaaaaatgcagaaggagcgctggccatgaagtggatgtgttcaatatgctgcgccgccgtattgcttgccggaggtgcagcacaggcggaagcggtgccgaatgagccgattaattggggctttaaacgaagtgtcaatcatcagccgccagatgccgggaagcagctgaacagtttgattgaaaaatatgacgcgttttatttagggaatacaaaggaaaaaacgatttacttaacgtttgataacggatatgaaaatggctatacgccaaaagtgcttgatgtcttaaaaaaacatcgcgtaacaggaacgttttttgtcaccgggcatttcgtaaaggaccagcctcagctgatcaaacgaatgtcagatgagggccatattatcggcaaccattcctttcaccatccggatttaacgacaaaaacagctgatcagattcaggatgaacttgattcagtcaacgaagaggtttataaaattacgggaaagcaggacaacctgtatttgcgtccgccgcgcggcgtgttcagtgagtacgtactgaaagaaacgaaacgcctcggctatcaaaccgttttctggtcggtcgcttttgttgattggaaaatcaacaaccaaaagggaaagaaatatgcctacgatcatatgatcaagcaggcgcacccgggagccatttacctgcttcacaccgtatcgagggacaatgcagaagcgctggatgacgcgattacagatctgaaaaaacagggctacacatttaaaagcattgatgatctgatgtttgagaaagaaatgaggctgccgtctttgtaaaagagaaagacctctccttaaacggagaggcttttctttattttatacatttaatcagtgcggcccagtccagatccccgaagcctttctcaatcccgttttcaaaatggcttttggccagctcggcaagaggaagatttgcagaaacccgttttgcggcggcgagtgccaggttggtatccttcagccctaaagacattttgaagccggccggctcaaatttctgctcggccataatggttccgtaattttgatagactggagaaccaaagagcgcgctggcgatttctaaaaattgtttttgttctaagccgtatttctccatcattaagaaggattcagataacgcctccagcatagacacgagtaagaaattgatgctgattttcgctgcatttgctatcttgctttcttcgccgacgtcaaatacctgctggctgaggctgtcgagcagaggcttggcggtttgcttcgcttccgccggtcctgctgttatgatgcgaagcgcggctttggctgcggcatccggtctgccaaggacgggagcggcgagaaaggattgtcctttctctgcatgagccgctgcgagcttttctgagaactcaacactgattgtgctcatcgagatgtgaatgccgttctctgctaatccttcaagcagcccgtcttctccgaatgtcacggtgctgacagaatcatcatctgcaagcattgtgatgacaatatcagcggactttgccgccagccgcggcgtatcagctgcctgtgcgccttctgtgacaaggtcttctgtcttttgtttcgtccggttatagacagtcaattcgtagcctgcttgaagaacatttcgggcaatgggctgtcccatattgccgagtccgatgacagcaattttcaatctgatcactccctgaatattttttccattataaacaatatgaacagaatatgcatagcgatcggcttataacaaaaaagaacagcttcccgctgccctcatttaaaaatattgaaccatcctttatgtacaaaccaaatcagcatcccgattacaagcgcagccatcaggccaagtacagcaaaatatccgtatttccaatgcagctccggcatgaagtcgaaattcataccgtatacaccggcaataaaggtgagcgggatgaaaatggttgatacgatcgtcagtgtcatcataatcgcattcatccggtttgagtttagcgtcacgtagctgtcacgcaagtcagacgtcatgtcacggttggattccacaatttcagataactttaacaaatgatcatatatgtcgctgaaataggctttcgtttcccgctgttctttcacatggtcaaggcttaaaatccggtagagcaaatcacgcatcggaataatcgtccgtctcaaatgcaataggtctgttctgagatcaaacacctcgttcatcagcgttccatacgttttgtggggacggctttcttcaatttcattcagccggtcttcaattttatacacgagaggaaaatattcatcaacaagctgatccatgatcatataagaaatatgcccgggcccttttttcaatatatccggtgaagcatacaaacgctcccggactttagcgataccgggcgtttcgtgtaaatgaaaggtgacgacaaatttttcgccttgaaagatatcgacttcctccgtctcaagtgtttccttattcagcgcatgaatcacgtaaaaacgatagccgtcataatggtcaagcttcggccgctgcatatgctggaagcaatcctcaatggcaagcgggtgaaaatgaaaaaaatctctcaataacgccgtttccgtatcctccgggccgtaaaaatcaacccagtaccatgcaatatcaggctgttccactcgttcgatcggtatatttttcagcagctgatgctctgttgtgattgcggtaatgttgatcataaacaaccctccacctgccattatatcatgcggtctttatgagaaaagtatacggtactctctgcctaattcaagcggcatgttatactgaacaaaaacggaaaaaagggtggatctcatgtggaaggaaaaagtatctgtcacgcctccgtatcattttgaccgcgtgctggacaggctgtctttagaccccctcaatgctgttgatcgagaggcgagggaagtccgtgtgccaatcagaaatcaagcgggggacgtatgtattgtaaaggtacaggcgttaggccatgcgggcgagcctgagttcctcgtcagcggggaaacggatcagggagaaatgatgaaggaaatcaagcggatttttcaatgggaaaatcatttgcagcacgttctggatcatttttcaaaaacgagcctgtccgccatttttgaagagcatgccgggacgccgcttgttctggactacagcgtgtacaactgcatgatgaaatgcattatccaccagcagctcaatctttccttcgcttacacgctaacagaacggtttgttcatgcgtttggcgagcagaaggatggcgtgtggtgctatccaaagccggaaacgattgcaaaactcgattatcaggatctgcgtgatctgcaattcagcatgagaaaagcggaatacaccattgatacatcaaggatgatcgcagaaggcacactcagcttgtcagagctgccgcatatggcggatgaagacattatgaagaaactgatcaaaattaggggtatcggcccgtggaccgtgcaaaacgtcctcatgttcggacttggccgtcccaatttattcccgcttgccgatatcggcctccagaatgccatcaaacgccactttcagctggacgataagccggcaaaggatgtcatgctggcgatgagcaaggagtgggagccttatttaagctatgcgtctttgtatttgtggaggagtatagaataattcgtctgacaatgaaggaaatcctgcaaacgtgttatactagaaagatgtgaaaaaaccatttcactttctgccatccgcagaaagcttcatatagaaacggagagaacaacgtgaaccaacaaaagaaacaggcgcccgtcgaactgaaggtcggacaaacctttccgctgacgattaagcgtctcggcattaacggagaaggtgtcggctattttaagaaaaaagtcgtcttcgtgcccggcgcgcttcctggcgaagaagttgttgtgcaggccacaaaggtccagccgaagttttcggagggccgcattaagaaaatccgcaaggcatctgagcaccgggtggcaccgccttgccctgtttatgaacaatgcggcggatgtcagcttcagcaccttgcatacagccagcagcttcgggaaaaacgcgatatcgtcattcagtctcttgaacgccatacgaagtttaaagttgaaaacatggaaatcaaagaaacgattggcatggacaacccgtggaattaccgcaataaaagccaattccagatcgggcgctcgcaaagcggcagcatcatcgccggcttatacggccttgattctcatgacatcgtgccgattaaagactgtatcgttcagcatccggcaacgaacaaaacaacaggcatcgtccgccgcattttagaggacttcaatgtgtctgtttataatgaaagaaaacgaaaaggtgacgttcgcacgatcgtgacgagagtcggctttgaaacaggcgaagtgcaggtcgtgcttgtaaccgcaaaagaaacgcttccgcacaaggaagaaatcgtcaaagcgattcaaaagcgattgccagaggtcaaatccattattcagaatgtaaacggggcgaaaacttcagtgattttcggtgagaaaacaaaaccgctcgccggaaaaacagtgattcaagaagtgctcggcgacgtatcttttgaattgagcgcccgcgctttcttccagctcaatccggaacagaccgtcaagctgtatgatgaagtgaaaaaagcggcgcagctgaccggaaaagaaaaagtcgttgatgcgtattgcggcgtcggcactatcggcatgtgggtggcggacggagcgaaggaagtccgcggcatggacgtcatcaaggaatcaattgacgatgctaagaaaaacgccaaaaaacacggcatggcaaatgccacatacgtaacaggaacagccgagcactggctcccgaaatggacgaaagaaggcttccgcccggacgtcgtcattgtagacccgccaagaacgggctgtgacagcacgttcctggacacgatcaaaaaagtcaaaccgaaacgctttgtctacgtttcctgcaatccatccacgcttgcgaaggatttgcagacgctgtcgaaggactatcgcgtggactatatccagcctgtcgatatgtttccgcagacggcgcatgtggaagctgtggcgagacttgtattgaaatcgtctcattaattcctaatcagatctggatttcggcagaatgaacattgccgatttccgggtctttttcgtgcatagcccttgtcctaactgtctgttctcaattttatcttccttctcattctcggagatctttattttaactggcgaaaagagttgaaaaaacgtgttgaaaagcgggtgaaaataagcgttatttaaccgggaaaatatcctcccagtatgattaaaatacatgagtaaaataatgtaaaatcatagatatattttcataatttgtaaaattatatattgacttgcagttattatgtgtgaaatattgattataggaatataaggaaaggtatggcgtatatcatttcaagagtcattcgatgtaaaaagttgaaacattgtaattaaatgaaagaggtgaaaatgatggccaaccccattttaaaatgaataatgtatgagcactacaacaattaaataatagtgccgacgataacaactattacagtaatacctacaatggttatatccttgcgacaatcatgcttcataataatttagattgacacttggctaaaaagtattgcagagaaggaaatggataactaaatggataaagtatataaaaaacgaccgttatataaaagaagttggtttcaaacatttttggcatttttagtatctcagctttattttaattttgtagaattaacgggagggggtcctaagtatagagaaatgaatggattcccagcaaacatagttgaactagatttctttcaaacatatctttcattctatgataatccatggtttaatattattactgttttcttgggagttttcactattatacaaataattacaggggtaacaaaggatattcgaaattaaagcaataacttctgatgccttatttaataatgaaagaaaatgtacactttcttaattatcttatgagtgaagactgcgacacttagtcagcagtctattttattggttctggatcaggcttaccgaattataaccctatacaaatatatagtaggttgccacttgctgcgttggttattttctaaatcatgagcaaatgccaaatgattcagattgaagttcttgaattcttttaaataaggatttattttctcttctcatcctctttactccatgtgattcataagtggtagcagcttaagtagagttttttttattctcttgagtactcagttataccacccccaactcaatttgcttaatcaaagtttatctcttgaaattagtttttccgcaaatatgatattgagatacggatatggtgtagcgttaaatatcttatcctcaataacaggacaattagtttgcgttggtaatatggagaactcatatgatattctatttaggttggaatcctttttatccaaaaagttcaaaagcaaggccactaagaaagacgaaggtcagcgccagtgttaaccacaatataaaaaatagggtagctaatcatcccacgtgaaatgttcaaaatttactatagattgataagaaatgctttcgcatgcgataagtgtaaaagaagcatggtcagttttttaatattgagatacaggtatagccgtatcccctaatgaaaggatttgatttttgttatgacagaaaatttctggcgtgaattaccacggccgttttttgtactggcaccaatggaagatgtgacagatgttgttttccggcatgtagtaagtgaagcaggcagaccggatgtgttttttacagagttcacaaactcagagagctattgccacccggatgggaaggatagcgtgcgcggccgtttgacttttacagaggatgaacagccaattgtggcccatatatggggagataagcctgaaaacttccgtaaaatgagtattggcatggcagagttaggatttaaaggactagatatcaatatgggctgccctgtgcctaatgtggcacagaacggtaagggaagcggtcttatccgccggccggaagttgcagcagagttaatacaagcagcaaaagcagggggattgcccgtaagcgtaaaaacaagacttggtttcacggatgtagacgaatggcgcgagtggctgacacacatactgaaacaggatattgccaatctttctattcatctgcgcacaagagcagaaatgagcaaagtagatgcgcattgggaactcatcccggagattaagaaacttcgtgacgaggtggcaccagatacattgttaacaataaacggggatatccctgaccgccaaactggcttaaaacttgctgaacaatacggtgttgatggaattatgattgggcgcggtatttttacaaatccatttgcctttgaaaaggagccgaaagagcatagcagcaaggaattgcttgatctcttaaggctgcatctggatcttcatgataagtattcagcattagaagcgcgtccgtacaagcctcttcctcgctttttcaaaatttaccttcgcgggttccgaggggcaagtgaattaagaaatcaatgcatgaacacaaagtcaacagatgaagtgcgtgcattgctcgatgactttgagagaaagtatcttgatggtttagagtaacagcagtgcttgattcaaaaaaggctaacaccattcttgactaaaataaacctggatgttcggtaaaataaacaattccgatttccgggtcttttttgtacgcagcttttactcagcctgtcttttctctaatttattgtaagaaaataatggtatatttagtggagataacttataaagggggagaggaaaatgaaacgactatgcatcatcccctgcggcaagaaaaaaatctgggacgtccagcctgatgccgggccggtaagagcagaggacgcttatctcagcccgtttcatcaggtgtgcgagcggtatgcgaaagcatttttcgatgagtgggtgattttgtctgcgaagcacgggttcctccgccctaatgatctcgtttcgggaaattacgatgtcacttttggcaccggtcatccggaaatcatgacagcggacgagctgagccgccaatttcacgaaaaaggcttttctgatatcgaagagctagtcatgcttggcggaaaaaaatatcgaagcgttctaaacgccgtcatcggagagcaccagcatatcagctggccgctatcatcatacaaaggcataggctacatgctccaagcgctgaaccgagctgttgaagaaaagcatgaactgtagcacgtatataagaagaaaagagtgtgaacatgaaaaaacttgtgtttggcttgcttgccattgcgttattcggatgcggactatatatctatcatgtatggttcggtgatccattttcgaaaaatgctgcagaacagaagctagtctcttatgtgaaacaaacctatcctaagaaagaaatcaagatcacgaatggggtatataacgctaaaacctctgaatatgtattcgaagcaacctcccaatctcatcgctacccaatgtgtacgaagggatttctgcatcctaaagtaacgtgcgatggaattgaagaagcgtataccgaatcagtatcaaaacatgtaaatgaagaagcaacgaaggcaatcgaagcagatctgaaaaaagcggttcctcgacttataaaagctgatgctgctttgagtatcgaaaacggacagttcacgttagatacaaaatggaacaaacagctggctgaaaaagcgcctatgagcatgacgattcagttagacgccagcgggttatcaaaaacagatgccgcaaagatggcggaaattgtcagaaaaacgcttaatgaaaagggatatacatactcaaacggcacgatagactgtatgcagaaggacggggacggcggtatcggatatgtcaaatattcaattgattttctttcaaaagcagctattcagtcaaacgatgcagaggaactaggaagttaaaaagatttccaaggaaataaatacgtcgatcattgtcaaaggccgggtgatatccggtctttttttttgcatgctgtaaaacgagacaaatgaatcagtttgagacaaaacgagacacacgtctcaaactgtctccaaagtgaagacgagaagactgattttacgggctcaaaagactggcacacttcttgcatttataatggtgaaccctaaatagaaggaggcgcacaaaatgaaattgttaaaacgagaaggcttgtcattaactgaggaaaaagcgctgtggatgtaccaaaagatgctggagatcaggggctttgaagacaaagtgcatgaactgttcgcccagggagtgcttcccggattcgttcatttatatgccggtgaggaagccgtggctgtaggggtgtgcgctcatttacatgatggcgacagcattacaagcacccacaggggacatggacattgtatcgccaaaggctgtgacctggacggcatgatggcggaaattttcggaaaagcgaccggattgtgcaaaggcaagggcggttctatgcacattgcggatcttgataaaggcatgttaggcgcaaatggaatcgtcgggggcggctttacgctcgcatgcggatcagcgctcacggctaaatataaacagactaaaaatgtaagcgtttgctttttcggggacggggcaaataaccaaggcaccttccacgaagggctgaatttagcggctgtatggaaccttcctgtcgtgtttgttgctgaaaacaacggctatggcgaagccaccccatttgagtacgcatcagcctgtgattcaatcgccgatcgggcggctgcttataacatgccgggggttacagttgacggcaaagatattttagcagtttaccaggcagccgaggaagcgatagaaagagcaagaaacggcggcggcccgtctttgattgaatgtatgacctacagaaactacggccatttcgaaggagatgcccaaacctataaaacgaaggatgaaagagttgagcaccttgaagaaaaagatgccattcaaggttttaaaaactaccttttaaaagaaacagatgctaataagctgtcagacattgaacagcgtgtcagcgaatcgattgaaaaagccgtctcgttcagcgaagacagcccatatccaaaagattcggagctgctgacagatgtgtacgtgtcatatgaaaaaggaggaatgtaagagatggcgagagtcataagcatgtcagacgcgatcaatgaagcaatgaagcttgcgatgagaagagatgaaaatgtgcttttgatcggtgaggatgttgccggcggagcggctgttgatcatttgcaggatgatgaagcatggggcggtgtattaggagtcacaaaggggctcgtacaggaattcgggcgcacaagagtgctggacacaccgatttctgaagcgggctacatgggtgcggctatggctgcggcatcaaccgggctgagaccgattgcagaattaatgtttaatgactttatcggcacatgctttgaccaggtgatcaaccaaggggcgaaattccgctatatgttcggcggtaaagcgcaagtgccgattaccgtccgcaccacatacggagcgggatttcgggccgctgcccagcattcacaagcgctgtatggccttttcacgagcatcccgggactgaagacggttgttccatccagcccgtatgatgccaaaggtctgctgcttgcagcaatagaagacgatgatccggtgttcttctttgaagacaagacgtcctacaacatgaagggcgaggtgccggaagattattatacaattcccctcggaaaagcggatatcaaacgcgaaggcaatgatgttacgctctttgcagtcggcaagcaggtcaatactgcgcttgaagcggctgcacagctttcagagaggggcatcgaagctgaggtgcttgatccccgcagtctgtctcctctggatgaggatgcgattttcacatcgttagaaaaaacaaaccggctgatcatcattgatgaagccaatccgcgatgcagcattgccacggatattgctgcgattgtcgctgacaagggctttgatttgcttgatgcgccgattaaacggattacagcgccgcatacaccggttccgttttcaccagtgcttgaagatcaatatttgccgacaccagataaaattgtcagcgtcacgcttgaattgcttggcgagccggcaatgaattaaaggggggacacaaatggcggtaaaagtagtgatgccaaaattgggaatggccatgaaacaaggggaagtatcgatatggaataaaaaagtaggcgacccggttgaaaagggagaaagcattgccagcattcaatcggagaaaattgaaatggagatcgaagcgcctgaaaaaggaacgctgatcgatatcaaagtgaaagagggagaagaggttccgcccggcacagctatctgctatatcggggacgccaatgagtcggtgcaggaagaggcgagtgcgcctgttgctgaagacaatatgccgcaagccgttcagcccgtcaaacaagaaaacaaacccgcagcctccaaaaaagatcgaatgaaaatatctccagtcgccagaaaaatagcagaaaaagcaggattagacctaaaacaactgaaaggaactggaccaggcggacgaatcgtgaaggatgacgtaacaaaggctcttgctgaacagaaaaaagatcaggcaaagcctggttcggaacagaaagcgcaggaaatcccggtgacaggcatgagaaaggtcatcgctgcccgaatgcaggaaagcctggcaaacagcgcgcagctgacgatcacgatgaaggctgatatcactaagcttgccactcttcaaaaacagctttcatcaactgcggaagagagatacggcacaaaactgacgatcactcattttgtctcaagagccgccgttctcgctctgcaagctcaccctgtgctgaacagcttttatcaaaatgagcgcatcatcacacatccccatgtacaccttggtatggctgtagccttggaaaacggcttagtggtgcctgtcatccgccatgctgaaaagctatcgctgattgaactggctcaatcaatctcagaaaatgccaaaaaagcacgcgagggacgtgcgggaagcgaagaactgcaaggctctaccttctccattacaaaccttggcgcgtttggagttgagcatttcacaccgatactaaatccgccggaaacaggcattctcggcatcggagcaagctatgacacgccggtgtatcaaggggaggagatcgtcagaagcacgatcctgccgctcagcctgacatttgatcacagagcgtgtgacggcgccccagccgctgcattcctgaaggcgattaaaacatatttggaagaacccgcagcattaattttataggaaaagcaggtgaaaacgacatgacattagccattatcggcggcggacctgcaggctatgcggctgcggtctccgcggcacagcagggcagaaacgtgctgctcattgacaaaggcaagcttggggggacctgcctgaatgaaggctgcatcccgacaaagtctttgttagaaagcgcaaacgttcttgataaaatcaagcatgccgacagctttgggatcgaacttccggcaggtgcgatatcagtcgattggagtaaaatgcaaagccgaaaacaacaggttgtcagtcagcttgtccaaggcgtacagtacctaatgaagaaaaatcaaatacaggttgtaaagggaacagcctcctttctttctgaaagaaagctcttaatcgaaggagaaaacggaaaagaaatcagagaggcggaccaagtattgattgcctccggatcagagccaatcgagctgcctttcgctccgtttgacggcgaatggatcatcgacagcaaagacgcgctttctctttccgagattccgtcttcactagtcattgtcggcggcggtgtcatcgggtgtgagtatgcagggctgttcgccagattgggatcgaaggtgaccatcattgaaacagcggaccagctgattccggctgaagatgaagatattgcccgtctctttcaggagaaacttgaggaagacggtgtcgaagtgcatacttcatccagattagagcgggtggatcaaacggccaaaacggcaatatggaaaagcggtcagcgagagtttaaaacgaaggccgattatgtgctggtggcgatcggcagaaaaccccgtcttgacggattacagctggaacaggccggagttgatttttctccaaagggcattccggtgaatgggcacatgcagacgaacgtgcctcatatttacgcgtgcggagatgctatagggggcattcagctggcgcatgccgctttccatgagggcatcatcgctgcttctcatgcttccggaagggatgtcaaaatcaatgagaaacatgtgccgcgctgcatctatacgtccccagaaatcgcgtgtatcggaatgacagaacgacaggcaagaagcatatacggggatgtgaagatcggcgaattttcattttccgcaaacggcaaggcgctcattaaacagcaagcggaaggaaaggtcaaaatcatggctgaaccggaattcggcgaaatcgtgggtgtctcgatgattggcccggatgtaaccgagctcatcggccaagcggcagcgatcatgaatggtgagatgacggcagatatggcggagcattttatcgccgcccatccgactttatcggaaacattgcatgaggcgctgttaagcacgatcggccttgcggtacatgcataataaaggaaaaagcaggcgcatggatataaggcgccggcttttttattgttgaaagcgctttatttttcccctacaatagatgaaaacggcgtgtaagggaggagcgatcaaggaaatgaattcggtcccaaacgatttgcaaacctggaaacgttttgtgaaagacggtgtgcttgacgaagcccgattaagaaaacggattgcagagtcatggcatcgctgcaaaaaagctgaggtcaatccttatttagaaaaaggcccgaaggttttacagcaaacggagctggatcagcagtcaaaaaaacattcattcttcttgacgaccgcaaagccttacctcgaaaaactgctgcctgccataaaagaaatggaaatgatggcgctgctaattgatgcagacggtgttgttctggcattggacggccatcccctcgcgctctatgaagccaaacgcatcaactttgttgaaggggcatgctggacggaaacggctgtcggaacaaatgcgattggcacggcgctccacatcagcgagccggttgcgatacaaggatcagagcattactccattgcttcccatctttggaactgttcagccgctccgattcaccatgaggatggcagccttgcgggtgtgattgacatatcgtgtccggcggcaggcgctcatcctcatatgctcggtattgccactgcgatcgcctatgcagctgaacgggaacttgcagctaaaagccgtgagaaagagctcgagctgatcagccgttttggagagagggctgcatccagtgtgccgatggtgctatgcaataacaagcagcacatcatcagtgcgagcataccgattcgaacctcaatgcctgattggcagggccggcacctgtatgagttgaaggaacggggctactcaatcgaaaaagctgtcaccataggagatggcggcacttgtttttatctttcggaacaaaagaaaaagaaggtgttccgattcaatggagtgatcgggaaaagcggccgatcgcaagcgatgctgatgaaccttgaacgtgcagctgcggcagatgcaacggtctgtttgtcgggcgaaactggtacgggaaaggaagtcgcggctcgcgctcttcatgagaacagtgagagacgtcacggtccgtttgttgctgtcaattgcggagcgattccgtctgatttgattgagagcgaactgttcggctatgcagagggcgcttttacgggagcgaaacgaaatggctataaaggcgcctttcaaaaagcaaatcaaggcacattatttttagatgaaatcggagaaatttcccactcgatgcaggttgcacttttacgggtgcttcaggaacgcaagataacgccaatcggcgggacgaaagaaattccggttgatatcagagttattgccgccacacattgtgatttacgcgagcttgccgaaaacggaaaaatcagagaggacttgttttaccgtcttcatgtctatccaattgaactgcctccattacgcgatcgcaccgaggatatcccggacctctttgagtactacaaacagaagaatcattggccaggcgaacttccttctgatttttgtcatgtgctgaagcaatggaagtggccggggaatatccgtgagctgtttaatgtgtttgaacgtctttctatcagatttccggacggccggctgagggatgaaccgcttcccgctttactggaagccgctggattgccggccagctctgcagaaaaaaagccggctgctgccggcgtgcttacctttcgtgagcaaatccaaaaggatatgatgatcaaagcgcttgaatctgcaaaaggaaacgtctctcaagctgccaaaatcagcgggattccccgaagcactttctacaaacgcctgaaaaaattcaacttgtccgctgaatcgtaaagcatacttccttcaggaaatggaaacgttatgtattgaaggagggtgttacgatgaatattcaaagggcgaaagaaatagtagaatctcccgatatgaaaaaagtaacatataacggcgttcctatatacattcagcacgtgaatgaagaaaacggaacagcaagaatttatccgcttgacgaaccgcagcaggagcatgaagtgcagctgaacagcttaaaagaggattaaacaaaaatggcccgcttcataagcaggccattttgttatccgcgcggcgcaaataaaataacacagacaccgatgagacaaatgaatgcgccgatccagtcatacagatcaggtgttttccggtcaacaagccatccccacaggaccgcaagcacgataaatactccgccataagcggcgtatacacggccgaaagatgggaaggactgaaacgtcggaagaatgccgtatacaatgaggatcagcgccccggcgattccatagccggctggctttgcctctctcagccatagccaaaccagatatccgccgccaatttcggcaagccctgccgcgagaaataaaagaatggtaatcagcatcatgagcactcctcaatttgcatttatctttcattatagaggaggagagcttttaaagcttcggatgattctcaaattccttcaaatacgcttttcgctgaacctctgtaaattggctgatccaattgttttgagcctcttcattcaaatggggaaggacatagcgttcaaccgcttcgaaaaacagcggattcgcgatgatgttccaggtcgggatgcgaacgattttcccgtctgttttctcgatgataatatcctcaaaaaagatccctttcagactgtattggtgacgtcccatataaagccgcttcacctcggaaaacagcacgctgcgctttctcgagaagatctcgccactaggtccggtctttatgctgaaaatgacatttccacggcttgtgaacgcaggaaaagccataaagaatgtgatcaatccataaattatcgccagtaatccgccgcccaaataaagcagggcatatttagattcaaacgtgagagcttcagccaccagccagactcccacaataaaggcgccccctgtagcgaggaacagccatattctaaaaaacagtctgcttttgaccttaatgacttcattgtttttcaattgctattctcctttatcgctctttagcaaaaagtattccttttatcacatctttatttgctgttacgatagaaaattcattttgggtaatacctgttaccagccaagtatgacggctgccaggcaggacgaaagccatgtcagctacttctggggagttgtctttgtcataaaccagccgcatcagcgtatccatttttccttttcgcaaagccagatcatttacaaaacgggtaacgtcctcttggtgatcatgcttatctagaaactccttgagatgtgtgggagtgtctgaagcgccctccaaaagcaattcaaattcagttgatgtcagagagagcattgattctttgtgatcttctgcatctattatatttaaaaactcggatgttttagagagtaatccattagttgaatccatttttttgattctatgcacctgttcatcaaacagcaattcatgagagtaagtgccaaactttgaaacatggcaggatatattctgttctttgccttgttcatcaaatttggacagcttcactgtatagtccgcgtcgtttaacacatggataaacggacagtattcgtcctttagccgatattgatgattccgatattccgcagcgtccttggctaagagtgagcggcacgcggcttcaaataaggcgccgagctgttcatcttctatttcgggaaaataggcttgttttaaggccattccctgttcgaaaaacccttcgctgtaaaaacaaaacaagagttcttctatgctgattgtaaactgcttcattgtttattctcctatccaaatgaaaatttccctttaaggaaatgggttgcgccgtgtatgagcgaatccgctgttttctttgctttttctattccttttttcgcactgtctatccctttatgtatcgttttattcgccgcatctatgccgtcattcactgatttgacgactttgccggctgattccagtccttttttggctgtatcaacgacagcatggatcggttctttaagttttatcgctgctttttcagcatagactgatgtgaattttgcgattttttccccaacaaaccctcctactgccgaaccaattgtgcctccgattactgtgcctacaggacctaacacacttcctacggcaccgcccacaacagcaccagctgtcgcaccgcccgcaataaaaatggtgttattcacagcatttccgacagccttggcgttttcacgcttgagaacttcgggtttattctggtattttgcataattttcagcaattttcacgcctgctccgaatgtttcggtcgcaccggtaatcagtgtggcggtaatggcatttcctttcgcgaatctcaagcccgtttttcccacatccttcaaagtggagcgtacgccggcttcattaagaaatccttttgtgtagcttctgacgctgtttgaaaaatccaccgtgtcctgagggaagtattttgtaaactttttatgtaccaaatctgaaaatggacggttggtcttttttaacaaatatttaggattcaaaagcactcttgccgctttttgataacgtgagctgtcaacggccctggaaatatccaagagcagttttgagtgctgggctgtatgcaagccgcttggctgtttcacaaatttcgtaagccctaatccgtaatattttccctgcgtcagcataagagcggttaagcttgtcatcgtaccgtatttgtcgtaggcattgtagagctttcgcaaaatatcatcttgttccacaaatttatcgcctgtttttctgatgaaaatctcattgtcactcagcttagtgacgagcgcctttcctgagctccacgcatcgcccactccagaaaaacagctgctgtagcggggatcgcattgcaaaatcatctgccccagctccacatgcaggtccttatatttgttttccatatcagttaattcagtgactacatcatttgcaagctgttcgagcttatccggatcaactgcaatgtttcctgacacaccgttcacctcccgagtttatgtctttcctctcttgctttacgctccagttcttccattctggcaatttcagcttttcgttcttctattttgacagcggcagccttcagctcttggcttgtttcaagcagctcctgttcgaattgatcgtaggcggctttcgtttcctcgaaatcctggtcaaacgaatctcttgatttgccctgccaagcatctcccaatgcagataaccgggattcaagcaacattttggagcttctgacctcttctgcggccgcactgtacttgtttgccagctcaatgactttatatgagtccaacttttgtcccctgccttttctaaattcacgcacaattggatgttttatataaatgattataaataattcggcatgtatccgaatcgtacaaaagaaccttttcataagaattggaagggcgtatattcacttaaaattcacagttggtgagactttaagattacaaaaaaggtaaaaaaaacaaatccctcagacataaggcaaatgagaaatttcccgctctatgggaaaaaacactaaagttgatcaaatgacctaagtgcgccaaacgtgttacgggacgggctatctcatggtataaatggaattgtaaacgttatcaaggaggtcgtcatatgaagaaaaaatcattctcaatcgtaatagcgggcggagggagcactttcactccagggatcgtactcatgctcttggaccatttggaggagtttccgatcagaaagctgaagctgtatgataatgataaggagagacaggatcgaattgcaggcgcctgtgacgtttttatcagagaaaaagcgccggatattgaatttgcagcgacgactgacccggaagaagcttttacagatgtcgattttgttatggcgcacatcagagtagggaaatacgcgatgcgtgcgcttgatgagcaaattccgttaaagtacggagttgtcggccaggagacgtgcgggccgggcgggatcgcatacggtatgcgttcgatcggcggtgtgcttgaaatattagattacatggaaaaatactcgcctgatgcgtggatgctcaattattccaatccggcggcaattgtggctgaagctacgagacgccttagaccgaattctaaaattctcaatatctgtgatatgccggttgggatcgaagaccggatggcgcaaattcttggcttatcctcaagaaaagaaatgaaggtccgctattacggattaaatcacttcggctggtggacatcaattcaggatcaagagggcaacgatttaatgccgaagctgaaggagcatgtatctcaatacggctatattccgaaaacagaggctgaagcggtggaggcgagctggaatgacacattcgccaaagcgcgtgacgtgcaggccgcagatcctgatacactgccgaatacgtatttgcaatattatttgttcccggatgatatggtgaaaaaatcaaatccgaatcatacgcgggcaaatgaagtgatggaagggcgcgaagcttttattttcagccaatgtgacatgattacacgtgagcagtccacagaaaacagcgaaatcaaaatcgatgaccacgcatcatatatcgttgatcttgcccgggcgattgcctacaacacaggtgaaagaatgctgttgatcgttgaaaataacggcgcaattgcgaactttgacccgactgcgatggtcgaggttccatgcattgtcggctcaaatgggcctgaaccgattaccgtcggcaccattccgcaattccaaaaagggcttatggagcagcaggtatccgttgagaagctaactgttgaagcgtgggcggagaaatcgttccaaaagctgtggcaggcgctaattttgtcaaaaacagtgccgaacgcgcgtgtggcaagactcattctcgaggatttaatggaggccaacaaagacttctggcctgagcttgatcaaagcccgacccgtatatcataactgaaattcccccattttcgaatctgtaattgtatataatagaaagaaaatggggggatctgatatgcagctcgaagaactgatcaatcagcactacagcaaattgaatgacaacgattttcatattttaaaatatatattgaatcataagcacacatgctatcaccttggaatcgacgcgctggccaaagcttgcagtgtatcgcgttcctcaattttacggcttgcccaaaagctcggtttcagtggctacagtgaatttcgcgtctttttaaagtgggaagatcagccggaagaaggcgagagtatgagttttgaaaagctgcttgatgatattgaagcaaatttgaagttcttacggacaaaggacatgacggacatgtgccagctgattgatgaagctgaccgcattttcgtctacggttctggaaatgcgcaaaagatatgcgcccgcgacctgcaaagaatgtttattccgcgccatcgctatcttattttaattgaagacacaaatgaatttaatttgatgcgcgatgattttaaagtaaacgatctgtttatcatcatttctctttccggagaaacaccggagctgattcctcaggcaagaatgctttctgcaaagggtattccctttatttccattacgaatttaaaaaacaatgtcctcgcccagctgactccgcataatctttatgcgacaagcaaacctgtgacattaagcgataaaacggaaattgtcgcttttgcaccgttttttctcgttggcgaagcattgttccgcgcatatgttgattacaaagaggcagaaaaaaatgacaatgagtagcagggggttctggtatgatgcaaaaaattcagcgctttggaagcgcgatgtttgtgcctgttttattattcgcgttcgccggcattatcgtcggtatcagcacgctctttaaaaataaaaccctcatgggcccgctcgccgatcccgacggtttttggtatcagtgctggtatattattgagcagggcggctggactgtttttaaccaaatgccgctcttattcgccatcggcatcccggttgctttggcgaagaaagctcaggcacgcgcttgtttggaagcgcttactgtttacctgacattcaactattttgtcagcgcaatattgacggtatggggaggagcatttggcgtcgacatgaatcaagaggtcggcggaacgagcggattaacgatgattgcgggcataaaaacgctcgataccaacattattggagccatctttatttcttcgattgtcgtctttttgcataaccgctattttgataaaaaactgcccgattttctcggcatctttcaaggctcaacatatatcgtgatgatttccttctttattatgattccgattgccttggctgtgtcttatatttggccgatggttcaatcgggaatcggctcgcttcaaagctttctggttgcttctggggcggtgggcgtttggatatacacgtttttagaacggattttaattccgaccggccttcatcactttatttacacgccgtttatttatggcccggctgtagcggaaggcgggatcgtcacgtattgggcacagcatctcggcgaatattcgcaaagcgccaaaccgctgaaggagctctttccgcaaggcggattcgcgcttcacggcaactcgaaaatcttcggtattccgggtatcgccctggctttttatgtgacagccaaaaaggaaaagaaaaaactcgtcgcagggctgctgattcctgtcacactgacagcgattgtcgccggtattacagagccgattgagtttacgttcttattcatttcacctttcttatttgcggttcacgccgtgcttgccgccacaatgtcgacagttatgtatatggccggcgtcgtcggaaatatgggaggcggactgattgaggcggtaaccttgaactggattccgctctttggcagccacggtatgacatatgtgtatcaaattttgatcgggctctcgtttacagcaatttattttttcgtcttcagatttttaatcctcaaattcaatatcgctacaccaggacgggaaaaggatgaacagcaggaaacaaagctatattcgaaaaaggaatacagagaacgaaaaaacaaggatgaaacggcctccgctgctgaaacggctgatgacaccgcttttctgtatattgaagcgctgggcggaaaagacaacatcactgaagtcacaaactgcgccacccgcctcagagtcagtgtcaaggacgaaacaaaggttgaacccgacagcgtattccgcgcgcttggcgcacacggcgttgtcaggaacgggaaggcgtttcaggtaattatcggattaagcgtaccgcagatgcgggagcgtgtggaaaaaatattgaatcaataaagactgccctccttttcgggagggttttcgtttgccgtcaaaaagaccgccatagtaaagtaaagaaagagacaatcgagtaaaaaggggtttggaggcttttacatgcaaaaggctttgtcgtttttaaaaccatattcattgctggcgggaattgcgctgattcttatgttgacggagcttgcagttgaactgctgcagcctttattgattgcgaaaatcatcgacgatgggatattgaagcaagatctgcggcatgtttggatatggggcgcggtcatgatcgggctgaccgtgttatcctttgcggcggggatgctgaattccttttatgccgcccatgtcagccaaagcttttcctatgatacgagaaaagggctttttcaaaaaatccagtccttctcctattccacatttggacagttttcgtcctcttcttatattacaagactgacaaacgacgtcacacaggttcaaaatatgatttttatgagtttgcggtttatgctgcgggcacccttaatgattgcaggcggcattgtgctgtcgcttgccgttaatgtgaaactcggcttttttctgcttgtgaccattccgatcctgatcttgtttttgctatgggtattaaggaaaggcggggcactgttccgctcagtgcagaaaaggctggatcaagtgaacaccatcatgcaggaaaatttaattgcaatcaagctgatcaaagcgctgcttcgcggcagccacgaagtcaaacgatttatcaaagccaacacaaggctgatggaaaaaacggtttcggcctttcagcttgtggaattcacgatgcctgtactgatgcttttgatgaatctctgcatccttttgattttgtgggcggggtcctacagtattacgagcggaagcactcaggttggcgatgttgttgcgataattaactacgcaacacgaattacaggcgcgctttcgatgtttccgtttttgattatgattttcacccgggcgaaggcttcaggggatagaatcggtgaggtgcttgaaacagaaggcgacgagcgggaggaaggcaccatatctgatcgtttgtcaggacggattgagtttcagcatgtatcctttcgctatcctgaaatggacagagaagcgctcaggaatgtctcattttccgcaaagccaagagaaacgatcgcgattctcggtgcgacgggctcgggcaagtccacgctttttcagctcattccgcggctttatcagccggattcaggccgcatttacatagatgaaaagccggttcaagatattccggctgaagggctgcgcaggcaaattggatatgtaccgcaggaagtcctcttgttttccggcacaatcaaagaaaacatcgcttggggcaaagaaaatgcttcactagatgaaataatggatgcggccaaacatgcgcaaattcatgaaacgattttgaagctcccaaatggatatgacacagttttggggcaaagaggcgtcaacctgtccggcggccagaaacagcgaatttccattgcgcgggcgctgattcgaaaaccggctatccttctattagatgacagcacaagcgcacttgatctgcaaacggaggcgaagctgcttgaagcaatcagcacataccattgcacaactttgatcattacacaaaaaataaccacggcgatgaaagctgatcagattttgctgctagaggacggcgaactgattgaaaaaggcactcacagtgagctgctttctgaatctcagttatacaagcgcatttacgagtcacaattcggaagggaggggagcgagtcatgctaaaagacatccgcaagcctttccaatatcccaaactgccaattgacaaaaaagaaggcgcgaaaaagcgggccaaagcaaaggatacaaagggcacactgagacgaatctggtcttacttggctgaaagaaaaggactgctcatacttgtcatgctaatggttgtcatcagcgccatattcggactccttggtccctttgtgatcggaaaggccatcgaccattttatcgtcgggaaaacggtcagcggcttgattcctgttttgcttcttctgcttgctatctatatcattcagtccctgtcgctttggtttcaaaactattggatgattacgatctcgcagggcacggttttcagaatgagaagcgaattgttcacccatctgcatgagctgccgattccattttttgataaacagcggcacggcgagctgatgagccgggtgacgaatgacatcgaaaatgtcagttctaccttaaatacgtcagtcattcaaattttgtcaagcgtgatcacctttgtcgggaccattgcagtgatgctgtacatgagcccgctccttacattgattacgctgaccattattccggtgatggcagcgagcctgaaatggatcaccaaccgaacgggaaagctgtttaaagaacagcagaaaaaccttggtgatctgaatgggtatattgaggaatctgtttcaggcgcaaaggtcatcaaagcatattcacgtgagaagcagattactgctgaatttctcgaaaaaaacgctgcactcaagacgtcgggcttttgggcgcagacgatttccgggtttatcccgaaggtcatgaactctttgaataacttaagctttacaatgatagcggcaatcggcggtttgtttgcgctgaaaggctggatctcgatcggctccatcgtcgtctttgccgagtattcaagacaatttacacgccctttaaacgatctggccaaccagtttaatacgatgctgtccgcaatcgccggcgctgaacgggtgtttgacgtgcttgatgaaaaagaagagcgcgaggatgaaaagaacgccgtgcatcagcccatccaaacaggcagcattgaattccgggatgtgtccttcggttacgataaagggcagcagacactgaagcatttacagtttaccgtgcctgccgggcagtccatcgcgtttgtcgggcctacgggggcgggaaagacaaccgtcactaaccttctcgcccgtttttacgagcctgacaaaggaaaaattttaatcgacggtacagatattaaaacccttactagagcaagcctgagaaaaaacatggggtttgttcttcaggattctttcttatttcagggaacgatcagagaaaacattcgctacggcaggcttgatgcttctgatcaggaagtcgaagccgctgcaaaaacagcgaatgcccatagttttattgaaaggctgccaaaagggtatgacaccgtgctgacgcaaaacggttcgggcatcagtcaaggacagaagcagttgatttctatagcgagggcggtgcttgctgatccggttcttctcattttggatgaagcgacaagcaacattgataccgttacagaagtcaacattcaagaagcgctcgcccgtttaatggaaggaagaacaagcgtcatcattgcccacaggctgaacaccattcaaagagcggaccagattgtggtgctaaaagacggtgaaatgattgaaaaaggcagccatgacgagctgattcggcaaaaaggattttacagtgacttatatgaaagccaatttgagaaatagacctttgtcctgcacagaggtcttttttgttacagttttatagtacttttatttcattttcgtaaaatgtaacaaaattacttgacgtaaacaagttatgtatatatactagcttacattaagtaagtgataacatttatcaaggaggataaaatgaataaatcatttgaaattggcacattacttttaagagttattacaggtattatcttttttgttcacggtttatcaaagtttcagggaatggagggcaccatccaatttttcggcagcataggccttccaagctttatggcgtatgtcatcgcagcgattgaactcattggcggagtgcttgtcttcttcggattggctacacgtattgtcggtgtactgttcgctcttacactgatcggcgccatcatcactgttaagctgaaagcgccattcatgggcaatgcagaatttgattaccttctgcttttgacatccattcacctggcgcttactggaagtcgattcctggcgctggacccatttgtgtttaaaggaaaaaagaacgaaaacgtttcagcataagaaaagaggcatgcagcatgaccagcattcatgaggatacacacattggctatgccaaactcacaattcgcagtctggagcgttcgcttcagttctactgtaacgtcatcggttttcaagtcttaaaaaagacggatcgccaagcggaattaacggctgacgggaaacgcgtactgcttattcttgaagaaaatccgagcgctgtcgtcttgcctgaacggtctgtgacaggcctttatcactttgcgattcttcttccggacaggaaagaacttgggatcgcgctcgcccgcctgattgaacacggcattgctatcggacatggagaccatgctgtcagcgaagcactctacctgtctgatcctgacggaaacggcattgaaatgtacgctgaccgcccccgcagcacgtggcagcgtgatcgggaaggaaactatgtcatgacgacaaccgctgttgacattgagggccttctggaagaggcaggagatgagcggaaaacatcgcttccgaacgatacaatcatcggacacattcatctgcatgtcagtgatttgaaagaagcaaaggcgttttatacagatgtactgggctttgacattgtcggaaactatgcgggcatgtccgccctcttcgtttcagccggggggtaccaccatcatatcggcttaaacatttgggcgggaagaaatgcgccgcctaaaccgacaaatgccagcggactagattattatactgttgtcctgccccaccaagaggagctggatttggtggcaaaccgagtcaaacacgccgggtattcgattgaagagacggaaaacagctttcgtgtgaaagaccctgtttccggcgcctatattacatttgtgatttaactgcaatccccttgccgaaaaaacggcagggggattttttattttccagaaactcctgtcaaaaatgccctgaggcaggtatgataagaagggaattgggtatcgggagtgatgagcgtgaaagctcttttttttacgagaatgttcaccttgatggtgagctgtttaatgtatctgtccattgtgaaagaggataactggtttggatatgtatttatagcagcaggtgctgccatgtatgcagccaatcatgttttgctgacaaaagagacaaatgccatctggttctgcctgattgatattgcaatcggcttttctttcggatttatctttcccggcacaggtttgttcattattatgctttgtccggttgcggtcgccttttttctgcggaggtttcctaaaagaacagcatggtctgtcttatgtctttcctctattttatttttgaccgtcctcatccgtacatatgcgatgttcggcaatgaatttgtcattgatcatttgactagcatgacattcgttgtcttctgcggtgtcgtgggcaaattaatccgcaagctgttggatgcgcaggatacggcaaaacagcagtttcaggaactgacggagtcccatctggcgctgtctgctgcacatcaggagctccatttatatgcgaagcaggttgaagagctgactgccatttacgagcggaacagaatggcgcgggaaatccatgatacagtggggcataaaatgacggcccttctcgtccagctgcagcttttgcgtgaatggcaaaaaagagacagccaaaaagcggatgagacagtaggtgtctgtgaaacacttgcccgtgaagcgcttgatgatgtccgcttatcagtacgcaccctgcaaactgaaaacgatccttcgctaatcgaatcgctgaaacagctgacagaggacttttgcaaaaatgcaggagtcacaacagaatttgcggtcagcggtgatcctgcaatcatcccgctgtctctccatccgaccctgatcagaacggcgcaggaagcactgaccaatgccaaacggcacggcggcgccgcagcttgttcgatacagcttgcctgcacaacggacagcatcagccttgtcattaaggatgacggcaaaggcaatcccgaggcagcacttggttttggtctcttgaatatgaaaaagcgggcagcggaacatggcggaatgatccgctttgaaagcgaacaggatcaaggatttactgtgaatgcagaattttcacttgccaataaaaaatggagcttcaggcccgtgcagcaaaaggagagtttattatgattaagatcatcattaccgacgatcaggatatcgtcagagaagggctggcatccctgctccagctcagagaagagctcgatgtgatcgcaacagcgcgaaacggacaggaagccttcgaaaaggcgaaagagctggagccggatatcgtattaatggacatccgcatgccggtttccaacggggtggagggaacaaaattaatcacaagctcattgcccggcgtaaaggttttgatgctgacaacctttaaggattcagcgctgattgctgaagcgcttgaagaaggagcaagcgggtacctgctgaaggatatgtcggcagatacgattgtaaaagcggtgatgactgttcattctggcggaatggtgcttccgccggaattgactgcccaaatgctgaatgaatggaagcgtgaaaaacagctgaaaggaataaaagagatagaaaaacctaacgagctgctcgacctgaccgagcgcgaaatcgaagttctggctgagctggggtacgggctcaataacaaagaaattgccgaaaagctttacattacagaaggcacagtcaaaaaccacgtttcaaatattatcagcaagctggctgtcagggacagaacccaagccgccatttactcggtcagatatggtatatctgtcttttgacatatgacgttttgcatatatgcttctctgaaaaggccttttacaggcctttttttcatgccctatgttctatctgccgctacatgccgcacgcctttctttcttctacaatggcaatggatcaaaaaaaggagtgagacgacgtgctgcaagcagaaaacatcaaaaaggcatatggaaaaaaaacaatcgtgaaaggtatttctttttccctccaaaagggggagtcgttcggtctgctcgggccaaacggtgcggggaagtccacaaccatttcgatgatttccggccttgtgccgcatgacagcgggaacatcacggtgggcggctatgtcatcggaaaagaaacggccaaagcgaaacaaaaaatcggcattgttccgcaggaaattgcattatatccgacgctgacggctcatgagaatcttatgttttgggggaaaatgtacggacttacgcacggcgaggccaaaaaaagatcggctgaggtccttgaatatgtcggtctgactgagcgggctaaagataagattgaaacgttctccggggggatgaaacgaagaatcaacatcggtgcggctttaatgcataagcccgagctgctgattatggatgaaccgactgtcggtattgaccctcaatcgagaaatcacattttagaaacggtcaaacagctcaacgaaacgggcatgacggtgatctatacgagtcattacatggaagaggttgagtttttatgcgatcggatcggaattattgatcagggggaaatgattgcgattggcacaaaaactgatttgtgcagccgccttggaggcgataccatcattcagctcacagtcagcgggatcgatgaagcgtttcttttggcgatccgttccctggctcatgtgaatgatgtaacagtccaggagtcagagctcaaaatcgacatttctgcggctcatcatgagaaagtcgtcaccagtctgcttgctgaagccgctgctcatcatataaacctgctgtctcttcaggtgcaggaaccgaatctggagcgcctgtttttgaatctgaccggccgcacgttgcgggattaggaggggcggcaatgaaaaaaagcatatggatcgcatggaaagatgtcaaaatcagaatcacggacagaaaagggtttatgatgcttatcctaatgccgctgatcctaacgtgtattttaggggcggcgctcggatcagttgttgacggaggcaaccggattgatgacatcaaagtcggctacattcaatcagaccagtcagatgcagcgaacatgtttacaaaagatgttctcaaaaaaatgaagtcgataaaggccacaaaagccggcagcgaagacaagatgaagaagctgattgatgaaaagaaaatcgatgtaggcatcgtcatcccgaaccattgggaagccggcaaaacctcagctgttgtttatgccgcacctgatcaaacattgaaaagttccatcatcgaaacagctgccagctcttttatagagcaatataaagcggtaaaggaagccgcgtcagcctcaatggactacatcagcaaaacggaagctgtacagcaaggaaaacttgaccctgcacagtttgcagaaaagctggcaaagacgctagaaaaagaaacaggtgacaagctgactattgcagaaaaatctgtcggcagcaaggccgttaccagctttcaatactattcggcggcaatgctttgcatgtttatgctgtttcatatgacagtcggggcgaaatcgtttttacaggaaaaggatacggagacgcttgccagaatgctgatgacgcctgcgcaaaaatccgtcattctcttcggaaaatggcttgggacgtatctgtttgctatcatacaatttttcatatttctgatcgtcacaatcaatgtatttggtgtggactggggcggtaatctgctgtttgtgagtgtactcgggctttcttacgccgcagctgtatctggtatttcaatgctgcttgcgtcgtgcatcagcgatatgaaatctgcagactcgataggcggcttcggcattcaattgcttgcggttctcggcgggtccatgctgccgctgtaccaatttccggacgtcttgcagtctgtatccaaagcggtgccaaatcgctgggcgcttgacggctttctttctttaatggaagggggaggctgggctgaccttcaaaagcctgtgcttctttttgcggcgatcggcttttgttcacttgtaattggtatcagacggcttcatacaagataaggaggtacaaaaggtgaaaaaaattctagccatttgcggcattgagctttctctcatttttaagaagccacagaactatttgatcatgtttgctgccccgcttttgcttacctttgtatttgggagtatgctcggcggcaatgatgataaggtgcggcttgcaatcgttgatcaggacgatacgattctctcacagcattatattcggcagctgaaggcacacgatgatatgtatacattcgaaaacgtgtctgaaaacaaagcgtcagaaaagctgaaacaaaagaaaattgccgggatcatcgttatttcccgctcgttccagacacagctggaaaaaggcaaaaaccctgaactgattttccgtcacggccctgaactgtcggaagcgtcgatggtcaaacaatatgcagaaagcacattggcaacgctcaatattcaggtgaccgcggcaaaaacggcatctcagacagcgggagagaactggaaggcggcgtataaaaccgttttcgccaaaaaacatgaagatacagttccggctgtaaaacggcagacgctcagtgataaaaaagagggcgcggaagcaagtgacacagcctccagagcagcaggtttttccatcctgtttgtcatgctgaccatgatgggagcggctggaaccattttagaagcaagaaaaaacggcgtctggtccagattgcttacagcctctgtcagccgagtggaaatcggtgctgggtatgtgctgtccttctttgtcattggctggattcaatttggcatattgcttctttccacccattggctgtttgccatcaactgggggaatccggctgcagttattgtattagtgtcactttttctattgaccgttgtcggcattggattgatgattgcggccaacgtcagaacgccagaacagcagcttgcgttcggcaacttgtttgtcatcgcaacatgtatggtgagcgggatgtattggccgatcgacattgaaccgaaatttatgcaatccatcgctgaatttcttccgcaaaagtgggcgatgagcgggctgacggagattatcgctaacggtgcccgcgtcacagatattctcggaatctgcggcattttgcttgcatttgctgcgatcactttcgcagcggggctgaaagcgctccgagcctaaaaaacatctgccgtttaggcagatgttttttagcatgtgggtacattcgtatgggtgtagcctgaactgcggttaatccttatctatcatagctaaaattgattccagccaagaaacgtaatttttctcccgctccagcgctttcgttagcacaagatagtggccgaagtccggtgaagaaaatgacatcggctctgctgaagccataagcttttcatagcttccctgtaagtcagaaagcttggcctgtcgtttttgcagctggtctttgaacaaatcagaagcctcctggcgcgatagacaagaaatgaaataagccttcagcataaattcatccttcaccgtctcgggtatcggctggtggcggatcagccagtcatgcagttcctgctttccgctgtctgtcagggtgtacatctttttctccagctttgtgccctgaatcgttgtccgaaacgtgataaatccttcatccgtcagctttttgagctcagggtaaatctggctgtgcttggcgctccaaaactggccgagctcctctttaaaataactcgtaatatcgtatccactcaattcgccttttcgcaaaagccctaatatggcgtattttaatactctcatgctatcctccgtgtctggctgtttcgcaaaacagatgagccggtgctcaactgtgattctaactgcctattccccttattatagaaaagggaggaagggaacacaaccgggctctttggaaatgaagataaaaggtttgtcagaaggtatccgatttatctccgtcaatataaaagagatttaaatttaattttcagaaaaaatagtaaccatattgattttttatgtataataggaaattggtggtatgaacatgttaagggggaataaacgtgaaaaaagtacttatggcattcattatttgtttatcgctgattctatctgttttagccgctccgccgtctggcgcaaaagctgaatcagtacataatcctgtcgttcttgttcatggaataagtggtgcatcatacaactttttcgctattaaaaactacttaatttctcaaggctggcaaagcaacaaactatacgcaattgatttttatgataaaacaggaaataacctaaataacggcccgcagcttgcttcatatgttgaccgtgttttaaaagagacgggggcaaaaaaagtagatattgtggctcatagtatgggaggcgccaatacgctgtactatattaaatatttaggcgggggcaataagattcaaaatgtcgtaacgcttggaggggctaatggtttagtatcatcaaccgcgctgccgggtacagatcctgatcaaaagatcctctatacatctatttacagtctcaatgatcaaattgtcatcaatagcttgtctcggttacaaggagcgcgaaacatccagctttatggcatcggtcatattggcttgctctctaatagccaagtgaacggctatatcaaagaagggctgaatggcggaggcctcaatacaaattaatatcttcaaaaaacaacctgctgtctccgttacagtgggttttttcgtctgagaaagccatagggtcttatgaccttagtctatcatgcatacgtcaatttatgacatcaggcactttttcaaatagagcggacatgttaaggtacaaccatcgatttctatcaatttgaaataaaaggagcgctgttatgcaaattaaagaaatttttatgatccgctgcatttcgtgcttaagtgtcgtcttgctccatatcatttcaatggtcctgatgcttcaggcagaagctcttgcagatatttctcacactgttgattctttccgcacactcctgatgttcagcacgcccgcttttattttcatctctgaatttttactggcccgttcttatcctgatggggtgcctgacggttttttaaagaagcggggaaaagtgatttttgttccttttttatttatcgcggccatcgatgcgctgctgatgaccagtgcgatggggggagaggtaacctttctcgcgtttgtgcaaaaatatctggcgaacgttttcttaggaaactttatcggatacttcattctcgtcatctttcaattttacatgctgcatatgatgtttcatgagtacttgaaaaaagcatcgccgaaatgggtgctgtctatctcatttgtggtgacagccgcttatttaggctatttctccgcagccagcccggctcctgcttctgaagagggaggggcatttccgttcttctgggttccgttcgcaggctggcttttctacttttgtctagcctactattgcggaaaagaatacaagcgttttttagcgctgctgaaccaataccgctgggtggtgtacggcggcgcaattgcttccggggcgctggttgtcactgtttcttatgtgggtgaaatcggcatgatcagctcgaagcggcctgatatcatgctgtattcaacaagcatgattttcctgtgttttcacttgttttccaaaatgaagcatgtgccgaaaatcatgatgtttatcagcaactattccttttcgatttatctgcttcatgcctattttatgattataggctacgtgttgcttttgaatatgcccgacattcctgccgtaccggctgttctcctgttgtttgccgtgtgcacagccggcccgattatgacttcatgggcgctgaataagttcaaatatgggtatttatttgtggggaaaatttatcagccaaaacagaagaaggtaacagtcgaagtgcgtgatcacgcagggtgaaaaacaagcggcaggggggatcctgccgcttgttgtgtattaaaacatacagtatacacaatctttttcttgtaaaataaaggagaagagtgaatagaagggagaacattcatgacatcagtcaatctaagctacccaataggagaatacaaggcgagggaatccgtatcgaaggagcaaaaagataaatggattcaagtacttgaagaagtgccggcaaaattgaagcaagctgtagagggcatgacggacagccagcttgacacaccgtaccgggacggtggatggaccgttcggcaagttgttcatcatctggctgacagtcatatgaacagctatattcgttttaaattgagcttgacggaagagacaccggctattcgtccgtatgatgaaaaagcatggtcggagctaaaagactcgaaaacggcagatccgagcggctcactcgcgcttttgcaggagcttcacggaagatggacggctctgctccgcactctgacggatcagcaatttaagcgcggattttatcaccctgatacaaaggagatcattaccctggagaacgcgctcggcctgtatgtctggcactcacatcatcatatcgctcatattacggagctttccagacggatggggtggtcttaacgcttttgccggcggaaagccggaatactgatagcagcaatcaccagaagtgagatcacagcagccgctgcatataactgatcatagccgctggcgacactcgcatgaatggcgtcgcttatcgcggttttgacttcaggaacgggaatgcgttcgatttgttcttgtaaagaagaaacatcagaactgtcgatctccggaatcatctgcatcgccttttctgaatatccgctgtccgataagcggctgttgatctcatcacctatttggtcaaacccggctgtgataaaacctgcataaagagtaggcgccaaggtcagtccaatttgccttactaatgaaagcgtgccaagagctgtacccttatttgtttttgccgcttctgatacaaggacgttcagcggagcgcctaacagaaagccaaaaccgatcccagctgccacacttgcgatcataaactcccatttttccgtcacccagaacggaaataaagcaaaccccgcacatgagatgattcccgaaagaataacggtttttacaggacctttttggtcggtaagcgctccgccaagccaagcgccgattccggaagccaacgcaagcggtgtcatccaatagcctgcttttgcggcagggacacccaaatactgttcgacatatgacgggataaaaatgactgccgccaagagccccccggataacaaaccgatgataagcgtgcgctgaaacatatggtttcgcagcagagaatacgccaaaatgggatcgcctcctcgcatttcaactctcttttcatacgagataagcgctgcaaaacagagtatgccaaaaataatacatccataaacctccggattccccaagctgtgtaagagatttgccccgtcaagattggtcatgccgtacatcacagctaaaatcgacagggacaaaaggaagattccggccgcatcgaggcgcttagcctcaggtgcttttgtttccgcgataaaacatgcgccgaaaacaaccaatagcacggcaatcggcaaattaatcaaaaacagccaatgccaagacccggtccaatcaagcagaaagcttccgatatttggcccgagcacagcggccatcccgttcattgcgccaagcagcccaagcgccttcccttgtttttcctttgggagggtcgcgagaatgtgagagctgccgatgatgaaaatcccgccgcctccaagcgcctgaatcagccgcgatatcagaaagagcgggaagctttggctcaaagcaacaagcaaagaaccaagtccgaacaggcaaacctcaatgagaaagagtttttttctgccgtagcggtcggaaagctttccgacgattggcacactgacgctaagaccgagcgtataaagggtaatgccccatgatccccaggaaggggaaacggaaaacgactcgtttatcgttgttaaggcagctgaaataattccgttatctagcgcagccataaatacaccaatcgtaaacaggctgatcgcccacttttggcctttctgctctgttaatgcttcagacatattcatcaacctcctttttattcactcaaagtatattattcattttaaatgaactaaatgtcaaataaaaaaagcctgctcccgcagtttgcggatgacagacttacagatttattcttttttcgctttctctaatgctcttgaaaggatagacagcccttcggaaaccgcctgcttttcttcaggggacagcagctctaatgaacgcttcaatttcaggtggcctttttcatacaaaccccggaaaatatttttcgcattttctgtcaactgaacaactacagagcggcggtcctcttcagaatgtgagcgtttgacaaaccctgatttctcaaggcggtcaagcagcccagttgtattggacagggaagcccccattttttcagcaatgtcgctcactttcaatgttccatggttgtttaatagcatcagcactttcatttgcggcatgctcatatccagcttcatccactcggacacatcaccgaggccggcggaagttaagactttcatatagagcacccatatttcccgttcctccgatgaaagaatgttttcgtttaatactgttgtatcgtgtaaattatattccatttcatcacttcctcatcattcactcctcttaccatattactcgattttcactcctgaaagaaagtgagcagaaaccgcatgcgggactttgtccgaaaaataacggtagtgtataatgagttggagattattgggggagaggatcgaactagaatatgattggagagaccattgctgattaaaaagaatgctttatcaatattaaaaatcgtttttcctattgctgttttgctatttgttatttatcaatcgaaaaaagaactgacaaatctgtcattcaaacgtacgctcatggtcatcaacggactggaacgaactgacttatttatgcttgtgttgatcggcttgctggctgttgcggccatgtcgctgtatgattacgtcctgaaatactcacttcgcctatcgatcacaaacggaaaagtattcagggtttcctggatcgccaattcatttaataatgtgctgggcttcggcggtttagccggcgtcgggttaagaatgatgttatataaggagcatacgaaagaccataaggcactcgtgaaaggaatcgcctggctcacatcatctatgctgctcggattatctgttttcagcattttcgtcgctgcgagaatgctgccagtggatgaagtgattcatgaaaagccttggctatgggcggtcgttatcggttttgcgctgatattgccgctgtctttggcggtgtccaaaataaaagaccgcaaagctggggacgaagagaatgcggacaaagtgaaaaatccgattttcgcatatattggagcttcagttgttgaatggctcatggccgggatcgtcatctattttgctttgttcgctatgggcattcatgcagatatcaggtatgtgttcggggtgttcgtcattgcggcgatcggaggaatgatcagcctcgtgccgggcggcttcggctcgtttgaccttttatttttgctgggaatggagcagcttggctatcatcaagaggccatcgttacttctattgtgttgtacaggctcgcctactcatttatcccatttatcttgggactgttctttgccgcaggcgacctgacggaaaatacaatgaagcggctcgaaacgaacccgcgcattgcaccggcaattgagacgacaaacgttctgcttgttgttcagcgtgcggtattagtgagaattttgcaaggctcgctttcccttattgtgttcgtagcaggtctgattgtcctggcctcagtttccttgccgattgaccggctgacggttataccgcacattccgcgcccggcgcttttgctgttcaacggcctgtccttaagctcagcgctcattctgctgattctgccgatcgagctttataaacggacaaaacgttcctatacgatggccattacagcgcttgtcggcggctttgtgttcagctttttaaaagggcttaacatcagcgcgatattcgtattgccgatgattatcgtattgcttgtgctattgaaaaaacaatttgtccgcgaacaggcatcctatacactgggacaattaatattcgctgtggcgctgtttactgtggcgctctttaactacaatctgatcgcgggctttatttgggaccggatgaagaaggtgctgcgtcacgaatatttcgtccacagcacctcgcatattacacatgcaaccatcatggcgatcattattgtgccgctgttcttcttgatatttacagtggtctatcataagagaacgaaaccgatcggagagaaagctgatcctgagcgtcttgctgcgtttctcaatgaaaaaggcggcaacgcgctgagccatctcggttttcttggagataagcggttttatttttccagcgatgggaatgcactgcttctgtttgggaaaatcgccagaaggctggtcgtgctcggcgatccgtctggccaaagagaatcattcccgctcgtgctggaagaatttctgaacgaagcgcatcagaagggattcagtgttttgttctatcaaattgaacgagaggacatggcgctgtatcacgattttggctacaacttctttaaattgggcgaggaagcatatgtagatttaaatacatttaccttgactgggaagaaaaaagccggccttcgggcaatcaataaccgctttgagcgggaggagtatactttccatgtggatcatcccccattttctgatgcgtttttggaggagctgaagcaaatctcagacgaatggctcggctcgaaaaaagagaagggattctcgctcggattttttgatccttcctatttacagaaagcgccgatcgcctatatgaaaaatgcagaaggagagatcgttgcattcgcaaatgtcatgccgatgtaccaggaaggagagatatcggttgatctgatgcgctatcgcggcgacgctccaaatggcattatggacgcattgttcatccgcatgtttttatgggcaaaggaagagggctgcacgtcttttaatatgggaatggcacccttggccaatgttggcactgcctttacatccttctggtccgaaaggtttgccgctgtcatttttaataatgtcagatacatgtacagcttcagcggcctaagagcctttaaagaaaaatacaaaccggagtggcgagggaaatacttggcgtatcggaaaaacagatctctttctgtcaccatgttcctcgttacacgtctgattggcaaaagcaaaaaagactccgtctaataagacggagtcttttttttatttcgtttttaagaagtaggtttcaatatcatcaagcagatagtttgcggctttaattccgcctgcggttgtccacacgacgtcatcgacttcatgtgcattacctgacttcacggcctttaggtttttccatagtgaactgcttgtccactgattggcccatttttcattttcctttgcattatcggctttataagtgaaataaaacagcacatcagcatccatatcaggaatagattctttactgtcggttgagaacgtaaattggtccttttgtttcttaaacagctccacttgtttttcagggcgtttgaagccaagctggtctaaaataatcccaggaaatgaatcggtataatagattcttgactcaccggataaaaagcgtacgacagaaacggttttgtttgtctggtcgcccagcttgttttttaaatcagaaacgcgtttatcaaaatcggcaatgacttccttgcttttgtccgccttattcaccgcgttggcgtatagagtcaggttatccttccagttcccggccaaagattcagcaaaaacagtcggcgcaatcgcatttaactgatcataaattttctcctggcgcactttgtttccaataatcaaatcaggctttaattctgcgatggcttccacattcggttccgtttcaagaccgacgtttttaacacctttcatgtcatctttcagatagtcataccacgggtcgcccttccatgactttacggctccgaccggcttaatgccaagcgctaagagcgcctctgttccttcattagttaaaacaacaatccgttttggattggcggggatgttgtctgatgtccccattgcatgtttgaccgttcttgttttgctgcttgacccctcgctgttgcttgaactttctgaactattacaggcagaaagtaccataaaggccattaaaaatacgaatagcatgctgatatgctttttcatctttttcctcccaatattgaaattcattatcatttagatcataataagcagtgttaagagtgtcaatccctaattgaggattattctcaaaaacaaacattacatagtaaataactaggagaatattagatcatgatctgcaaaaaggcatcttcaaaatggattgtgttagtatgtctgattttcattttactggcggctgtctgcgcaagcgtcgtgtatggctatacaggtacgtcatggagacaggtctatcaggcgtttacttccttcaacggaacaaatgagcatgtcatcatcaaggatgtcaggcttccgcgcgctttggttgcgacagtcgtcggcgcctcgcttgcagccgcgggcgctctcatgcaggcgctcacaaaaaatccgcttgcgtcaccggggattttcgggattaacgccggtgcaggtttttttattgttgccggatcgttttttctgcatattcagtcacctcaggcgctagtatggagctcgtttcttggggcagcatttaccgctgcgatcgtctatgcagcaggctcgcttggaagagaaggactgacgccaatcaaactgacgctggcgggagctgccatggcagccatgttttcttctctgacacaaggcttgctttctgtcaacgaactcgagcttgcccaggtgcttttttggctgactggctctgtgcagggccggagtctggatctgttgatgacgatgtttccatatgcagcggcagcgctggtaatctgcttctttctcggccaaaaaattaacctcctcgttatgggagaagatgtggcaaaaggactcggccaaaaaacgggcctgctgaaatttgtgatggcgctttgtgttgtcatgcttgcagggtccgctgtcgccattgccgggccgatttcttttatcggcatcattattccgcattttgcccgctttgtcgttggtaatgattatcgctgggttctgccattttccgctgttttgggtgccattttgcttgtttgcgcggatatcggtgcgcgatatatcattatgcctcaggaagttcctgtcggggtcatgaccgccatcatcggaatgcctgtgtttgtgtacatcgcaagaagggggcgaagctatgaaacttcgttttggcgttactgcggctgaaaagaaagcatggatcgtctttttgattttactgggttaacagctgcggtactcatcataagcgctggtctcggacaaaggtttattcctccctgggatgtagcaaaaacattctttggtgcaggttccaagctggatgaactgatgatcatgtcgttccgcatgccaagaattttgacggctttatgcgccggtgtctgcttggcagcggcaggcgcgatattgcaggggctcgtcagaaaccctctcgcatctccggatattatcggaataacaggaggagcggcggtagcggtcgtgcttttaatgatgttcttctcagaccgcagcagttcacttacgatcagtctgtcatggcttccagcagccgcatttatcggcgcatcggctgtcgggctcatcgtctatttactggcatacaaaaatggcgcctccacatttcggctggtgcttatcggaatcggattttcaatgtcggcgcaggcgatgactaccctgttgatgatcaaaggcccgatttaccgagcatcacaagccaatgtgtatatcactgggtcagtttatgggtcaaactggcagcatgtaaaaatagctattatcttatctgtcattctcttattcatttgttttgtcgcgctaaaaaatatgaatatacaggtgctgggtgaagatattgcggcgggtgcaggaagcgctgtgcagcgaaatcgttttttcttgctacttttgagtacggctcttactggttgtgcagtttcagttgccggcacaatcggttttgtcgggctgatggcgccccatattgcaagacggcttgtcggctcatcttatggcgcgctgctcccagcgtcggcacttattggagctctgctcgttttaacagctgatatcgtcggcagaaccttatttgctccggtggaagtgccggccggcgtctttacagcggctatcggcgcaccttattttatttatttgctctataaaacaagaaattcttaatcgttacacccattttcttaaaaaagaaaatgggtttttttgataatgactgaagattcgtaattatttttgctatactgacagagacattgataaagaaagggcggcagatgaatgaaagaagcagaggtattaaaatatgaagcatttacaagcagtcccggcaaaggaaaccccgcaggcgtcgttttgcagggagacgattatacggaagacgagatgcagatcatagctgagcgtgccgggtattcagaaacctcctttatccgaaaaagcgagtcggccgatcttgaactccgttactttacacctggacacgaaatgaatttgtgcggtcatgcgacagttgcttctctttacgcattatgtgagaaaagaatgctggagagcggtaaaacgtacagcatccaaacgaaagcgggtatcctgcctgtgaagatttctgaaaaagatggccgtattcatatcacgcttgaacaggcctctccgcaattcaaaccatttacaggcgatcggggaaaacttgcgaccgcactgggtatcaccgatgaagattttcatgaagaccttccgattgtgtttggcagcactggcatatggacagccatcgttccgcttaaatcattggaggcttccaaaaaaatggtgccagataacaaacaatttccggaagtgttaattgatctgccaaaagcttcagtccatccgtttacctttgaaaccgttcatcccgacagcgacctgcacggacgccacttttcatccccgtattcgggaacgattgaagaccccgtgaccggcacagcatccggcgtgatgggggcttatatgaaacattatggaaatgccgagcagcataaatttatcattgaacaagggcaggaaattggaaaagacggaaaagtggagatcgaaatgaacgaagccggcggccatgtgaaagtgaacatgacaggaacagccgtttactcagaaacccgtattcttaaattctaatacggatgatggtttacaaaaagatgcactttccgttattattatgaaatgataatcattttcaattgcataggaaggtgagacggtatgcctcaaaccgaacaaatacatcagcattcagtactgcgggacatcatacgcagcagaagatcgattcgaaagtttaaacaagagccagtaccttcagcagtcattcttgacatgcttgaaacggcaaaatatgcgccaaatcacagagtgacagagccatggagatttatttacgtttccagtgagacaggtaaagcgaacctcatcaatacatttgcagcgttctctaagaaatccaagccggatatgacagaggaaaagcttcaaaatttcaaaaacacacttgggcgcgttccgggatttctgctcgtcgtgtttcaggaagatgaaaacgaaagagcgcgggacgacgattttgcggcaacaagctcgttgattcaaaatctccagcttcttgcttgggaaaaaggaatcggcatggtttggaaaagcggaaaaatcctttatgacaaagaagtccatcaggcctttggtttgcaggataatgagcgtttcgccgccatcatacaaacaggttatcctgacgaggcgccggaagtgaaaaaacgcacaccgatccgcgaccggtttactgaaatgtaaaaagccccttgtctcaaacggagacaagggtttttcattaacgagatttctttttcgctctgttgtcggctgctttcgcacgctcttgcgcttcgcgatcatctgcatcagcaagctcggttgaatattcttcgtaaacgccgtcagtttccctttttaatgtatcgggaacttgtggaagcttttgtttgtttttatcacggtttttgtggatatgatttctgcccatatcaaattccccctaaaaagtgatatcaaacaaatatagtatttggttttaaggggttatgtattcctacttccgcttagcagctttttccgcttttttaaattcgcctgaataaagaacttcctgcatttttttcaggttggcgccttgctggtgcttctccctctttttttccataaaaaggacctccttcaaccatgttattcttaaggttgacgcttcctgctgtttttatacagtctttcggtccgctatcagctgtgagagtgcaaattcaagatccgaatatgtaaaacgaaatccagaggttatcgcttttttaggaagagcgcgctgtcctttcacaatcaaaagactcatttcacccaatgcttttgataaaaagaattccgggacggggagccaatgcgggcggtgcttcacccgtgcaatcgcttttccgaattgcttcatgtccacaggattgggcgcggtgacattcattgggcctgagatgccggcattttccaccgcatatcggatcatctgggccgcatcctcgacatgaatccatgacagccactgccttcccgttccaatcgttccgccggccagaaacttataggggagaaccataagcggtagagcacctttttctccaagcatcacgccaaatcttgcataaaccgtccggatgcccatcgcttcaatatgctgtccttccttttcccacaggtgtgcagtatggctgagaaaatcctcatctgacgttgcagaatcctctgtgaaagttttctcaaggcttgtcccgtaaatacccacggcactggcttggatcaatgtcttcggcttctccttctgtttctgaataagccgctgcacttcacgcgtcgcattgatacggctggagagaatgtgctgcttcgttttttctgtccagcggccaaaaatcgattttcccgcaaggtttatccagacatcaatatgaggaagttcctgctccggggcggctccttccgtcagccattggacatatgtcatatttttttgttcagtttcccttgcgtttcttgataaaatataaacatggtgtccctggcggataagaacgcctgtcagatgctggccgagaaaaccggttccgcccgtcattgcgatattcatgaacatctctcctcatcgttctaataaatatactttacctcattgtaataaaagaaaacgcgtttcaggcctgagaagggagattaagatgccgtttattacaaaaatatcaacgcaaaaaaagaatacggaacgcttcaatatttttctggatgataaatacgccttcagcgtggacgcggatgtgctcgtgaaatttgagctcaagaagggaaaagaactcgatgatcttgacatcattgagattcaatacggcgatgaagtgaagaaaggcttcaaccgtgcgcttgactttttatcctatcgaatgcggtcgacgaaagaggtcgaggaccacttaaagaaaaaagaaacctcgccccccgtcattgcggaagtcatccataggcttaacgattacaagtacttaaacgaccaggaatttgcctcagcctatgtcagcactcacaaaaaaacaaacggaaaaggccctgatgttttgttcagagagctaagagcgaagggaattgatgccgatacaattaaggaggcgctaagttccttttcctttgaagatcagacaagagaagcggtcaagcatgttgaaaagcttctcaaaaaagataaaaagctttcgacgaaagaattcaaacagcgcgcccagctgcagcttcagcgcaagggcttctcatttgatgttatcagcgcggcgatggatcagattgaatatgaaaatgatgaagacacagagaaagaagcgctgcgccttcacgcggaaaaagcgtttagaaaataccgctatgacggctcatatgaaagcgccatgaaggtcaaacaatttttattccgcaaaggattctcactcgatttaatcgagcaattactgcaggaagaggagtactgaaatggagaaacgatacagtcaaatgacacctcacgaactcaataccgaaatcgcattactttctgaaaaagcaagaaaagccgaacagcatggaatcataaacgaactggcagtgctcgaacggaaaattacgatggcaaaagcatatttgctgaacccggaagattactcaccgggagaaacatatcgtgtggaaaacactgaggacgagtttaccatcagttatttaaatggcgttttcgcatggggatacagaacctcttcccctcagcaagaggaagcgctgccaatctcagtattgcaagaaaaagaataaagcgtaacaggaggctgattatcagcctctttttgtttgcagcacatttacacgaattcttaaagaaaaaatcattgaattcacttgaaaaatcttttaagatgaaactcgttgttttttaaaatcaaaggaggcgatgacgttgagtatcaaaaacccatctgtaaaatttattatatttgttcttatgatttgtacattttcaatcggctatacagaatacgcggtgatgggtattttgacgtcgattgccaatgactttcatatacaggtttcatccgcagggcttcttgtcacggcttatgcggctagcgtttgtttgacaggaccgctcgtcaccatcatttccgtcaagcttccgagaaagcctgtgcttcttgggctgatggcggtttttatcctttccaacctgatgagcgcactggcgccgaattttgcggtattggccatttcaagaattttatctgcgtccattcacggcgctttcttcgcgattgccatggtattcgcaagtgaaatggttccgccggaaaagcgtgctgcagctgctgcttcaatgaacggcggactgacagtggctctaatgcttggtgttccattcggctcttatctcggagatgtcctgaattggagagcggtgttttccatcattacggctcttggtgtcatcggatttttaggccttatggctgccgtgccgaacagaaaaccaaaagtgatcccaatgcttatgaatgagtggggggtttttaaacacaaacaagtgctgttttccttcgcgattaccattttaggctattccggtgtctttatcgcctacacctttatcgaacccattttgaggcattcagccggattcagcacggttggcattacaggtgctctctttgcgtatggattgggaggcgttgccgggaatttctttgctggaaaggtaccgctgcctttgctgactcggacgatgatcggcgtaatgatcggtttaatcggtgttctggctgtatttccttacatcgccatttacccggctgcagccattgtggcaacgttcctattcggggcatgcgcattcggcacgccgcctcttctgcaaacaaaggtcatttcctcatctgagggcggcacaaccattgccgcagctgtcagcgtatcagcatttaaccttgccaatgcccttggtgcatggatcggcggaatgattttaaacggaacaggctcttattcctggctgtttgcaggaggtgcgcttatgaccgcatgcggacttgtgctttctaccttcgcacacttatcagaaaagaagagcgtctacgaatatcaagtcaataaagggtaaaaaacagctgcagtgtatgcagctgttcttctttaccgtttgcctgaggctctcattctttcttgaggatgctgattgatagatccgtcagcacgctttgaagcatagtcgtcctttgctctcggttcaccctgaaatttgttttcgttttcgtaaggaaatcctttttctttatttcggaccatgtcatatccccctaggttcgagatcaaaaagttgcgtcttttcagatgaagacgtaaggttagtatatggagaacaccacgtaataaagcgttatttttttcctgaagaaaggagactgcacacatgaatatgtacattgagaaactgactaatctgcttctggaaaagaacgagatgatcagctatatacaggcaaaaacgtgggtggaattgttatggagcgatttcgaagcaacctacgcaaaagccggacacgcctatcaaggtgaaaaaatgactgaaaaaatcgtcacacaatggattgaaaactatggcggccagctccacctttttcaaagctcccgtaacgacgtgaatgattacttaaatcaaagcagaggccttttgcattaaaaacctgccgttaacgaccggcaggttttttcattttcttaaaattaccttaacaggaagaaatcataaacaaaacatgtttcaccagcctgtcaatcagggaataccacttatatcttgtcaaaatgcgaggaggagctttatatgaaaaagaaacaagtaatgctcgctttaacagctgccgcaggactgggtttgacagcacttcattccgctcccgcagcaaaagctgcgccccttcacgacatatctgtcagcatgccatcatccgatacttacatcataaaagcaggaaaactgaatgtccggactgagccaaatcatgaaggtgatattctcggcactgtatcatcagaacaaaaggtaaaagtcgataggttcgtaaatgccgattgggctcaaattcatttcaaaggaaagaaagcatatatttcaactcactttttaatgaaaaccgcaagccaagcgaaaacaacgaaacagacagccttctatgcaccgacgcccgaaaatggaaaagctaaacagctctcatctggaacagaggtgacaatacttgggtggggattcagtgaaaacggcggatttgacttcacttgggggttcgtggattatggcggagttaaaggctatattcacacaaaggatttacaaatgcgataaaaaggcaggccgaggcttgtctttttgcctatgcatgaaacatttcttctttctgcacgtaacaatgagaaaggagatgatgatatgacgggtttagtcggcggagggcttatgatcattgcgggcatactgatcaaactgtttcctcccaaatcgatcaacagtgtgtacggatacagaacgagacgctcaatgtcagatcaaagattatggaatgaagcgaaccgttacagtgcatcattaatgatcctgtcaggcttggtgattgcgggaatgggtttgctgctgggatcaaacttgtttattcttcagcttatcctgctgattgccgccagtgtcataacatttatgctaacggagaaaaggctgaaaatcatgacgcacagtcaaggaggagatagaagtggacggagttaaatgccagtttgtcaatacgaacggaatcacgctccacgttgcagccgcaggaccggaagacggcccgttaattgtcctgctccatggatttcctgagttttggtacggctggaaaaatcaaatcaaaccgcttgttgatgcgggttaccgggtcattgctcctgatcagcggggctacaatctcagtgacaaaccggaaggaattgattcgtatcggattgatacattaagagatgatatcatcgggcttattacgcaattcactgatgaaaaagcaattgtcatcgggcatgactggggaggggctgttgcatggcatttggcttccacacgcccggaatatcttgaaaaactgatcgcgatcaatattccgcacccgcacgtcatgaaaaccgtaacgccgctttatccgccgcaatggctgaaaagctcgtatatcgcatacttccagctccccgatataccggaggcatcactaaaggaaaatgattatgaaacattagacaaagcgattggattatccgaccgtcccgcgctttttacatccgaggatgtcagcaggtacaaagaagcgtggaaacagccgggcgcactgacagctatgctgaactggtacagagccctcagaaaaggaagcttggcagagaaaccctcttacgaaacagtaccttaccgaatgatctggggaatggaagaccgctttttgagcaggaagcttgcgaaagagacggaaaggcattgcccgaatggacatctcatctttgttgatgaagcttcccattggattaaccacgaaaagccagccatcgtcaatcagctgattttggaatatcttaagaaccaataagctaaaatttctctccatccgtctgtcataatggcagactttttctgtgcgtttttttcatagtctgttttaaacatgacaaaataacattaaaaatcatgaatgtcaccataaaattgtaacaaaaaacaggtttaaacgactttaaaaaaaggaatagccttactgaagatttgtgtaaaactcccctaaggcaatacttaaaaagaataataaaaagaaggtgccttaatgaagcaaggattaatctcgattattatcccgtcttacaatgaagggtataatgtcaaactcattcatgaatctttaaaaaaggaatttaaaaacatttattatgactatgaaatattcttcataaacgacggaagtgttgatgacacgcttcagcagatcaaagacttggcagcgacgtgcagccgggtaaaatatatatctttttctcgaaactttggaaaagaagccgcaattttggcgggctttgagcatgttcagggcgaggcggttattgtaatggatgccgatctgcagcatccgacatatttgctgaaggaatttatcaaaggctacgaagaagggtatgaccaagtcattgcccaaaggaacagaaaaggggacagctttgtccgctcactcttatcatctatgtattacaagttcattaataaagcggtggaagtcgatttgcgtgacggtgtcggtgacttcagattgttaagccgccaagctgtgaatgcacttttgaagctgagcgaaggaaaccgcttttcaaaaggccttttttgctggattggctttgatcagaaaattgtattttatgaaaatgtcgaacgaaaaaacggcacctccaaatggtcgttcagcagtctgtttaactacggaatggacggcgtcgtttcatttaatcataagccgctgagattatgtttttatacaggcattttcatcctgctgctttccatcatttatatcattgccacattcgttaaaattctgactaacggtatttctgtgcctgggtatttcaccattatctcagcagtgttatttctcggcggagtacagctgttaagccttggaattataggtgaatatatcggccgaatctattatgaaacaaaaaaacgcccgcattatttgatcaaagaggcgaatatcccgaacaaagacctgcctgaaacgaacgaattaaaaagcatgcggcgtctgacaaaaatgcactgaaaataccaagcgccattggcagtgctttttttgcgtgtctattatcttaaaagcaagactggagaatttatatgaaaagaaaacatatcatgatctatgcggccagtttgctggtgtccgttctggcacacgctttttttgtgaaagaatgggcggaaggcaggtatatgacaggtccgggtgacgggcttgcgcaaatgatcgtatttaaaaaattattatttgaccaatatacacacgggaattttttctacaattattcattcggacttggcggcggcacattcagtcagctcggctattatttttccgcgtcttttctttttcttgctgtgtccgccgctgtttggctgcttcaagccgtccagctgatcggagaagcggatacgcttttttgggcagagtcagctgttttcatcagtatttttaaattgagcttgatcatctttacgtccgcttctgtttttcattatcttcttaagcacagggcggcatcgttcacgggagccgtgttatacggcgtctcaattatttatttccgtcacgaagcgtattgggaatttttcaccgatacaatggtttggcttccgctgcttgtgcttggtgcagaaaaaattattagagagcggcgtccggcgtggtttatcgttgcgtgttcgctgacgttaatcaacaatttttactttgcatacataaaccttatattcatcggaatctatgtgctgttcagatggctgatccgtttggaaccacatgaagagaaaagatggattcaaatcagattatttctcgtttcaggcttcatttcttttggcatcagtgcggcggcgtttgtgccggtagtatacggttttttaaacaacctgcgccctccatacagccagaaaatagagtggctcaatttcgatgataatatcttattttcgagccggatcatcattgtgccggccgcttttctgctgtttttgtttattatttctttttacaaaaaccgtgtgtttcgtctctttgccgggttgagcctgctgtttattctgtttcatttcagtccgtatgcggcaagcgtctttaacggtttttccgccccgcaaaaccggtttgaatatgttctggcctttaccattgcgggagcagctgcggctggtttgtcacagctgtctgaattgaaacggaaagaactgctcccggccgcagctgtcgtcctgcttctttacttgtatcatattcaaaggtataagctcgatatatggaagcctgcgaatgaaagtattctattgctcttactcatgacaatcgcagccttgtttgctgcagcttttgcgaaaaaacgggcaaaaatggctgtgtacggtataatcattctttcttcgctgtttgtcgccaactcctatcaaaaatacgcgctctcagaaggcggcgatttggatagtgtgacaaaagaatatcttacaagtgaggaatacagagggcgggaatcatctgagctcatcagacgtttacagaaggaagacgatgatccgctcatgagaatcgactggatgaacggggtccgcaataatacgccaatcatttacggatttaatggcttcagcgcgtattccagcattttaaacaaagatctgctggccttctattggaatgatttaagcatcgatatgggcagggaaagcgtcagccgttacgcgtcattgggagacagggcgaatttatacagcctgctttacggcaaatattatatgaccgaaaaaacaaacgaagccagcgtcccgtacggattcaaaaagcatttagaaacagagcattatgcagtttatgagaatcagtacatgcttccattcgtcaaaacagcggatgccatatacagcgaaagtgagctggaccgattgcccgctcttgcgaaagaacaggcgatgctgaaaggaattatattaaaagatccatcaggaaaaacggagcagacaccaaaaccgtccaatttgatcaccaagtcggacatcaccgcaaaacaagcccagtatcaaaacgggctgctaaccgtaactggagaaaacggaggagagctgatcatcaccccgaaacagccatcatccgctgcgggagactactatgtcagcttttatttgaaaagcaaagcaaaagacaaaggatttacgttaaaggtaaatgattatgtcacaacaaggaaatcgaacaaatcgatctataaaaccggagtaaataatataacggtaagagtgcctaaatcaggccatatctcaatcaatcttccgaaaggaacctatgagctgagaaacatagcgctctatgaagaaaattaccaaacgctgaaaaacgctgtaatgcaaaataaaacagagaaagcagacaaactgaattggaacaaaaatcgactgacctttgcctatcatctgtcaaaagaccagtacatcatgcttccgatcccatatgaaaaaggctgggagctgaagatcaacggaaaaacacagaagatcgaaaaagcggattatgcttttataggcttcaaggcgcaaaagggagacaatcacattgagctgacttactatccgccatacttcaaaatatcggcggtcatatctctcgtcagtctgctgtttgctgttttctatataagacgtaaaaagcccggctctatatagagccgagctttaattttttctgaagtttttcttcgctgaatatccatcccgtataggacgaacgaatcgtgagatcatggccgatgtgaacaattgcgacaaacggataatggcctttgctccgataacgcaggtcgataaatctcacctcataatgatctttaaacgtatccacttcccaccggtataccggagaaaaggacagaaacgccgcaatgttatcatcctgctttgccgcatgcattacatcggtttcaggaacaggcacccgattaaatgtatccagaatcacgacatgtccttccatgcttcttcctacatagaaagcatgtgctgtcgtcactgcgattcgccattgcctgaatttcatcgttggagaaataataatgctttcgatctcatcatgaatcatctcatgaagcttccgtttaattctcagctgcatgatcaggcgcaccaagtagtagcctaccaatatgatatataagctgagaaacgtgatgccgggactcccgcctgcataccaaatcgcgatagctgctagatggctgataaaaataaacggatcaaacgtattaatcagcccgagcgcaacccattttttcgaaaatggacgaatggcttgtgttccataggcgttgaatatatcaacaaagacatgcagaacgactgccagcagtgtccacagccacaggtgcagaaaatcggcctgaggataaaataaatacagaatcgccgggatgatgacagaccaaaacaaaacggcgggaattgaatgggtaaatcctctgtgattccttatataaacagcattgtttttaagctttaacacagtatcaatatccggagcctgagagcccgcaagcgttgcgatcataacagcgtgagccattgccggatctgatccgacaacaggatcaagcgtcgcaataccgcccagtgcgatgcccataacgacatgtgtgcccgtatccataggtgacctccttgcaggatgatcctgcacattcactttgtaagaaattccccattttcatatacccaatttttaaactgattcaatcgttctcatatgtttccgctttttctttattactatttaatgtaacatattatcgtactgtgcccttagtgtacaacaaaaaacagtctaaagaaaagcggggcgcgaaagactggggagaaacacatatgaacgtacttgaagacaaattaaaacaaaaagacatacagcaatttcgcgatgatttaatctcatggtttgaacgagagcagcgcgttctgccgtggagagaggaccaagatccatataaggtgtgggtatctgaagtgatgctgcagcaaacgagagtagagacagtgattccttactttctccggtttgtggaacaattcccgacagtggaagcgctcgctgatgctgatgaagaaaaggtgctgaaagcatgggaagggctcggctattattcgcgagtcagaaacctgcaaagcgcggtaaaagaagtgaaacaggaatacggcggcattgtccctccagacgagaaagattttggcgggttaaaaggcgtcggcccttatacaaagggagcggtgctcagcattgcctacaataaacccattcccgcggttgatggaaatgtgatgcgtgtcatgtccagaattctttctatttgggatgatattgccaaaccaaaaacaagaacgatctttgaagacgccatacgagcttttatttccaaagaaaaaccatctgaatttaatcagggcttgatggagcttggagccttgatctgtacgccaaaatcaccctcatgcctgctatgcccggttcagcagcattgctcagcatttgaagaaggcactgaacgggagcttccggtaaaaagcaaaaagaaaaagcccgggatcaaaaccatggccgcgatcgtactgactgatgaagacggacaagtgtatatccacaaacggccgtctaaaggtttgctcgccaacctgtgggaattcccgaatcttgaaacacaaaaagggatcaaaactgagcgtgaacagctcattgctttcttagaaaacgaatatggcatacaagctgatatcagtgatctgcaaggtgtagtcgagcatgttttcacccacctggtatggaatatttcagtgtttttcggtaaagtaaaacaagtgtcggataccagcgagctgaaaaaagtatcgaaagaagagctcgaacaatttgctttcccggtgtcacatcaaaaaatctggaagatggcagtagaagcagccgccatctcggctgctccgtaaaccattcttaatcgtaagagacgcgcgtgccgtggctgtagtccgcttcattgcgcttcattccgccgcgcgcttcaatttcttgcgttaattcccggtattttgattggccttcttcgttcaaataaggcataatttgctgaaaggcatgatgaaaataagcgagttcactgttcttccaatcttttttggaaaccatgttcaattcgctcatatcacgtccgacatacataacagaagaccccctttaaagttcttgccattattgtttgtggaaataaaagaactatacgctacaaggagatgaggaaaaatggaacaaaataaatgtgcactcgtaacaggaagcagccgcggtgtcggaaaagcggccgcgatcagacttgctgagaacggctataacatcgtcattaactatgcacgcagcaaaaaagcagcattagaaacagcggaagaaatcgaaaagcttggcgttaaagtgcttgtcgtaaaagcaaacgtaggacagcctgcaaaaatcaaagaaatgtttcagcaaattgatgaaacgttcggcagacttgatgtttttgtcaataatgccgcttcaggagtactaagacctgtcatggaattagaagaaacacactgggactggacgatgaacattaatgcgaaagcattgcttttctgcgctcaggaagctgccaagctaatggagaagaacggtggcgggcatattgtcagcattagttcattaggctctatccgctatcttgaaaactacaccacggtcggtgtatcaaaagcagcgttagaggctttaacccgttatcttgccgttgagctttcaccaaaacaaattatcgtcaatgctgtttcaggcggagcgatcgacacagatgcgctgaagcacttcccgaatagagaagatctgcttgaggatgcgcgccaaaacacgccggcgggacgcatggtcgaaattaaagacatggttgatactgtggagtttctagtgtcttccaaggctgacatgatccgcggacagacaattatcgttgacggcggacgctcactgctcgtttaaaaatttttaaaaaagaggaatagctatacgatcacctgcacattctaatgaccgtggaggtgataacaatggctaactcaaataacttcagcaaaacaaacgctcaacaagttagaaaacaaaaccaacaatcagctgctggtcaaggtcaatttggcactgaatttgctagcgaaacaaacgctcagcaagtcagaaaacaaaaccagcaatcagctggacaacaaggtcaattcggcactgaattcgctagtgaaactgacgcacagcaggtaagacagcaaaaccaatctgctgaacaaaacaaacaacaaaacagctaatcactgaaacagaaaaaagcacttcatcttcgggtggaagtgcttttttctgtttgaaaaacgacaaaacttgtggaaggtctacagaatgagtcaaagggtttgctttatggagatcgaaatgattaaaggaggaaatgtttatactttcatcaggctgaaggaggaaccgatgaccgaatttgaaaagctggtaagtgaacagatgaaaacgatggataagcttctcgatctccaatcagagctcgaccgctgcaaacaaattgaggcggaactccggcatttggaaagggatgcaaggctgcgtgggattcaggctgaaattgcggtaaaacggaaacaccttgccgatatacaggatatgtttcaaaagcagacagagcaggtcattcgttcatatcgcagctcagaaaagccgtcttcctttgtgtagtgcaggaatgtgccattccccggccggaatggctcttttattttcatttttcaatttgtaacgttataataggtaaaagacgttgtcggtaagcaaatttggacatactaactgtagggctttatagaaagtaggggagaaatatgggctatcccaaggaaggagaaaccattcaaattcacagctataagcacaacgggctgattcatagaatttggaatgagacaacaatcttaaaaagtacagaaatgtgtgtcatcggagccaatgaccggacgatggtaaccgaatcagacggccggacatggataaccagagagcccgcaatctgttattttcacgcaagacaatggtttaatgtcatcgggatgctgagggaagacggggttcattattattgcaacatcagttctccgtttgcctatgatggcgaagcaattaaatatattgattatgacttagatgttaaggtttttcctgacatgacctacaatattctcgatgaagacgaatatgatgatcatcggaaagccatgaattatccaaaagaaatcgacagtattttaagagactacttaaatacgctgctccattggattcaccagcgtcagggaccgtttgcgcccgagtttgtcgatatgtggtatgaacggtatttgcgctatacaaaataatggttacgtaaaaacctgttgcggggtacaacaggtttttcacatgggctcacacacatcatgataaagagagagggggaatcaacgtgggggttatgaaacgctacatgcaattcgtcaaaccttataagaagcaaattttcgttacagtattaatcgggatcgtaaaattctccattccgcttgctctcccattgcttctgaagtacgtagttgacgacattattcaaggaggcggcacggccagtgacaaaaccacgtcattgttcacgattatggcgatcatgttcgccttatttttaattttgcgcccgcctgttgaatattaccggcaatattttgcccagtggactgccagcaaggtgctttatgatataagagctaagctgtttgaccatatacaaaaactgagccttcgtttttacgcgaatacaagaacaggggaagtcatttcccgagtgattaatgatgtagaacaaacaaaggatttcgtcatcacagggctgatgaatatatggctcgatatgctgacgattttgattgtaatctctatcatgctcacactggacgttaaattaacgctgatttctatcgtattattcccattatacggaatatcagtgaagtatttttacggccgtttacgaaagctgacaagggagcgctcacaggctcttgctcaagtgcaggggcatttgcacgaacgcattcaaggcatgcctgtcatcagaagctttgcgatagaagatcatgaacaggctcaatttaatgagaaaaacggtcatttcttagataaagccatccgccacacgaattggaacgccaaaacctttgcggtcgttaataccattacagatttggcgccgctcatcgtcatagcgtgcgccgggtattttgtcattaatggaccgctgacagtcggaacaatggtcgcgtttgtcggatatattgacagaatgtacaaccctgttagaaggctgatcaattcctctacaactttgacacagtcaatcgcatcaatggacagggtgtttgaatttattgacgagccctatgaactcactgacaaaccaaatgcgataaaggccgatcagattcgcggaggagtggagtttcaaaacgtttcgtttcaatatgagaaggacaaagaaaatattcttcatgatgtatccttaaaagtaaatagaggagaaactgtagctctcgtcggcatgagcggaggaggaaaatcaacgctcgtcagcctgatcccaagattttatgatgtaacaagcggcagactgctgattgatgggacggatattcgcgattatgaagcaagaagccttcgcaaccaggttggtatggtgcttcaggatacctttttatttagtgaaacgattcgggaaaatatcgcgatcggcaagcctgatgccacacttgaagagataatcgaagccgccaaagctgcaaatgcccatgaatttatcatgagttttccagaaggatatgagacccgggtgggagaacgaggcgttaagctttcaggcggacaaaagcagcggatctcaattgcgcgggtattcctgaaaaatccgccgctcctcattttagatgaagctacatcagctctggatttggaaagtgagcattacattcaagaagcgatggacaaactggcgaaggatagaacaacttttgttgtcgcccaccgtttatcgacaatcacccatgcggataagattgttgtcatggaaaacggcacaatcattgaaatcggaacccatgatgaactcatggactatgagagccagtacaagcatttatttaccattcaaaatttgaactaaaacatcaatcttatatccttttaacgaaggatataagatttttttgtgtataaaaaaacccggctgtttaaccgggttactcttctgtttctatttcgcagtctttcggatgatacgtttgaaaacttgtgataagtgtttctaaatgttcaagctgctcgcgatattccacggcgcttgccataatattgagcatgttgtaatcaataagctcctcatccgtattctgctgattttttaaaaatgactttgttaaaagctgcttataccggatgccttcttcaaccgcgtcatcatgcggcttgatttttccgacaaacctcatcaaaatccgttcgtgccagtaaagcaggtaatcaagttcttcagtcaatgtttcctgaaactcttccggcatatgatagatctcgttttccagacgatgcagcttcttcaatgtatcaagcgcccgatttgcagtaataatggcctgtctgaacaggacaagctttcttgatttcacataagtcgttttcttaaagtaacttctttcttctttatatagaagatatgtctgatcaagcttgatcattttttctttcagtttttcaatatcctctttcaaaatcgaatgctctgtcgactgccgcatggacaatctgatccacttcataatttcttcggtgttttcgacggtattatgaatcagctttgtttcgtacttaggaggcaaaaacacaaggttgacgataaaggaagaaagcacccctaagatgactgtgcttgttctgatcagcgcgaacattaaaaagtcgtcaccggcagattctaatatcgcaatgactgttacaagagcaattgaaattgtatgttcaattttaagtttcagcatgattgtaatgacaataactgctgttaacccgatcataatcgggctgggtccgaaaataaggccgaacactgtggcaatcacagctccgatgatatttgcttgaacctggtcaataataatgagaaaagagcggtaaatcgacggctggatcgcaaatatcgctgcaattccagcgaaaatcggcgcgggaagcccgatccacgaagccaaataaagggcaagtgtaatcgcaatcccggttttgaaaatgcgggcaccaagtttcattggtttgtgcgtgcattcctttctatagtaaattgtgtgacatagcaaatgggctaatccttaaaattcccggttagtttatttgctaaacaattaagtaatatacagggatcgatacaaatattcaagctatttttctagaaaaagaccaaaatcttacacgttgtttgattccataaaaaaaacaggagctcaaagctcctgttcaaggtatctgattctagtttttaagatgtttaaaagcatcctcgaccgctgcaagcgtgtctttaatatcctgctctgtatgtgctgtggtaataaaccaagcttcatacttagaaggtgctaaattaattccgcgttccagcatcagcttgaaaaacgtagcgaatgtttctccgtcactccgttcagcctgctcgtaattttcgactttctcatcagagaagtataccgtgagcgcaccttttaaccggttgaccgtaatggtgatgccgtgtgtttctgcgtgcttcaaaataccttcctcaagcatagcgccaaggtgatcaagcttttcatacacgcctttttctttgagcacttccagacaagcgatgcctgataggatggaagcggggttccctgccattgttcctgcctgataagcaggtcctagcggagctacctgctccatgatttcttgtttgccgccataggcgccaatcggaagtccgccgccgataattttcccgagtgctgttaaatctggtttcacctgtaagagatcctgcgcgccgccatacataaagcggaaagccgtaatgacttcatcgtaaataacgagagcgcctgcattatgtgtcaattcatttactttttctaagaagccctctttcggctccacgataccgaagttgccgacaatcggttcaacgagaaccgccgcgatttcactgccccatttatcaagagccgctttatagctatcgatatcattaaatggtactgtgatcacttcgtttgcaatgcttttcggtacaccggctgagtctggtgtgccaagagtagacgggccggagcctgcggcgacaagcacaaggtccgaatgcccgtgataacagcccgcaaatttaatgatttttgtccggcttgtatatgcgcgagccacgcggatggtcgtcataacggcttctgtacccgaattgacgaatcttactttgtccatagcgggaatggcttctttgagcatttttgcaaatgtaacctcgtgtttcgttggtgttccatacaatacaccgttctctgccgcttttttaatcgcttctgtaatatgcgggtgggcatgtcctgtaataatcggaccatacgccgctaaataatcgatgtatttgttgccgtccacatcccaaaaataagcgccgcttgctttctccattgcaacaggagaaccgccgccgactgctttatatgatctagacgggctgtttacaccgccgacaatgtgctgtaatgcctcattgtgaagttcaattgattttgtatgcaagaataaaaacctcctatatctccatgcgtcctttctattgtagcatgcttccgaacaagaacaatggcttcgggcttcagattcagctgagatggttgtaatctggacaagaattggatacgcttaataaaaaacatccggaggtaacgtaatgactatagaaatcggacataaagcgcctgatcttgagttaaaaggtgatcatggggaaacagtaaaattatcggattataaaggaaagtacatcgtgctttatttttatccaaaggacatgacaccggggtgtacaactgaagcatgcgattttcgggacagtcacgaaagcttcgctgaactggatgccgtcattatcggcgtcagcccggacagccaggaaaaacacggaaaatttaaagagaagcataaccttccatttctgcttcttgttgatgacgagcataagctggcggaagcatttgatgtgtggaagctgaagaaaaatttcggaaaagagtatatgggaatcgagcgttccacttttttaattgataaagaaggccggctcattaaagaatggagaaaagtaaaagtaaaggaccatgtagccgaagcgcttcaaaccctcaaagatatgtcggaaaagtaaatctctatgagcctatgcttacttttaccctgatatcaattgacaaattatcgtagaaagagttacactaattataaacattacaatgtaagaattttttttagaagagaggtgcatgacggatggctgcacatgaactaaaagaagccttagaaacgttgaaggaaaccggagttcgcattactcctcaacgtcatgcgattctggaatatctcgttaactctatggctcatccaacagcggacgatatatataaagctctggaagggaaatttcctaacatgagcgtagcgacggtatataacaatttgcgtgtgttccgggaatcaggtttggtaaaagagctcacatacggtgatgcttccagcagattcgattttgtcacatccgatcactatcacgcgatttgcgaaaactgcggtaaaattgtggacttccactacccgggccttgatgaagtggagcagctcgctgcccacgtcacgggcttcaaggtaagccaccaccgtttagaaatttacggcgtctgccaagagtgttcgaaaaaagaaaatcattaaaaataagctgaccgcacgaaacggtcagcttattttatttcgacattttctttttattataagactcatcaaattcttttccttctaatcccttatctaaagtcagcggctctcggcaatgcatgcacatatcgactcttcctaaaacctttgtctctttatcacagcctggacaaatgacgcgaaccgctttagtcgaaagcattccgatccaaaagtaaactaccgtgctgagaccgatggataaaagcccaagtatcataaacaaactagaaagcaaaactgactctttgaaaaagatcccgatgtacataatgataaacccaacgaaaaccaaacttaacgcaaatgttctgattttattaattttgctggagtatttcgccatgtccatccccctctgttttaactatagcacaaacccgatgggattttcttcatgttttcggttgaactggaatttacatatggagagttactgtgaaattgtttataatagttcaatgtgtttagaaaaaaggaatttcgttttaaccatagaattgaatcaaatagagaataaaaaaatttgaacaattgcattggaggaatagtgatggaaaatcttctccgtccaatttaccaagaaagagcaagtcaccccaatacattggctgtcattatgattgagagaagaaacaaaacatcttccttaacagataactttgatgcagctttgctggtgattgtaaaggatgctgatgagccagtttttataaagcattatgaatttgatcatcaaacagcttctttgcatgtggtaacagattctcagattcaagaatggattttgcttggaacaaatagaagaatcatagattggattgtaaatggcagagtcttgtttgaccgtaatgaatacgtagttgaactgattgacaggctgaatacatttccgtttgccgaacgtaaactgaagatcggactcgaatacggcaaattaatcagaaggtatgttgaagggaaagctttttttgaagccaatcaatttttagatgcctacaatgccgttgttcatgcgctgcatcatttagcacgtattgaagtaatcgacagaggattccatcccgaaaccacggtgtggagccaagtgcgccagatggagccccaagtgtacaaattatattccgagctgattgaaagtcatgagagcctggaaaaaagacttgaattattattcttagcaaatgattttctcatccattccaaagccgagatcggttcggcgcatcttttcgaagtaatgaaagaaaaagacatttggcaattcggtgagcttcttcaacatcatgacctaaagcactttacccaagatcttggcgttatgcttgattacttgacagaaaagggacttatcaacgtctgccagatagaaacgaaaggacaggctgtctatcaccgaggatattcttttaaaaaagatgttgactctgattcttgaccgtgttatattattaaacgtcgctgatgcgcttctgagaaaacaagctcacagcggcgggaaaataaatcaaaaaaacatttgacaaaagaaagtcaaaatgttatattaataaagtcgcttcaacaagaagtgaaaatgatctttgaaaactaaacaagacaaaacgtacctgttaattcagtttttaaaaatcgcacagcgatgtgcgtagtcagtcaaactagggtctgcacgacgcaggtcacacaggtgtcgccgcagaaagcggtgaacttaacctgtgatccatttatcggagagtttgatcctggctcaggacgaacgctggcggcgtgcctaatacatgcaagtcgagcggacagatgggagcttgctccctgatgttagcggcggacgggtgagtaacacgtgggtaacctgcctgtaagactgggataactccgggaaaccggggctaataccggatggttgtttgaaccgcatggttcaaacataaaaggtggcttcggctaccacttacagatggacccgcggcgcattagctagttggtgaggtaacggctcaccaaggcaacgatgcgtagccgacctgagagggtgatcggccacactgggactgagacacggcccagactcctacgggaggcagcagtagggaatcttccgcaatggacgaaagtctgacggagcaacgccgcgtgagtgatgaaggttttcggatcgtaaagctctgttgttagggaagaacaagtaccgttcgaatagggcggtaccttgacggtacctaaccagaaagccacggctaactacgtgccagcagccgcggtaatacgtaggtggcaagcgttgtccggaattattgggcgtaaagggctcgcaggcggtttcttaagtctgatgtgaaagcccccggctcaaccggggagggtcattggaaactggggaacttgagtgcagaagaggagagtggaattccacgtgtagcggtgaaatgcgtagagatgtggaggaacaccagtggcgaaggcgactctctggtctgtaactgacgctgaggagcgaaagcgtggggagcgaacaggattagataccctggtagtccacgccgtaaacgatgagtgctaagtgttagggggtttccgccccttagtgctgcagctaacgcattaagcactccgcctggggagtacggtcgcaagactgaaactcaaaggaattgacgggggcccgcacaagcggtggagcatgtggtttaattcgaagcaacgcgaagaaccttaccaggtcttgacatcctctgacaatcctagagataggacgtccccttcgggggcagagtgacaggtggtgcatggttgtcgtcagctcgtgtcgtgagatgttgggttaagtcccgcaacgagcgcaacccttgatcttagttgccagcattcagttgggcactctaaggtgactgccggtgacaaaccggaggaaggtggggatgacgtcaaatcatcatgccccttatgacctgggctacacacgtgctacaatggacagaacaaagggcagcgaaaccgcgaggttaagccaatcccacaaatctgttctcagttcggatcgcagtctgcaactcgactgcgtgaagctggaatcgctagtaatcgcggatcagcatgccgcggtgaatacgttcccgggccttgtacacaccgcccgtcacaccacgagagtttgtaacacccgaagtcggtgaggtaaccttttaggagccagccgccgaaggtgggacagatgattggggtgaagtcgtaacaaggtagccgtatcggaaggtgcggctggatcacctcctttctaaggatattatacggaatataagaccttgggtcttataaacagaacgttccctgtcttgtttagttttgaaggatcattccttcgaaatgtgttctttgaaaactagataacagtagacatcacattcaattagtaacacaagatatcacatagtgattctttttaacggttaagttagaaagggcgcacggtggatgccttggcactaggagccgatgaaggacgggacgaacaccgatatgcttcggggagctgtaagcaagctttgatccggagatttccgaatggggaaacccaccactcgtaatggagtggtatccatatctgaattcataggatatgagaaggcagacccggggaactgaaacatctaagtacccggaggaagagaaagcaaatgcgattccctgagtagcggcgagcgaaacgggattagcccaaaccaagaggcttgcctcttggggttgtaggacactctatacggagttacaaaagaacgaggtagatgaagaggtctggaaaggcccgccataggaggtaacagccctgtagtcaaaacttcgttctctcctgagtggatcctgagtacggcggaacacgtgaaattccgtcggaatccgggaggaccatctcccaaggctaaatactccctagtgaccgatagtgaaccagtaccgtgagggaaaggtgaaaagcaccccggaaggggagtgaaagagatcctgaaaccgtgtgcctacaagtagtcagagcccgttaacgggtgatggcgtgccttttgtagaatgaaccggcgagttacgatcccgtgcaaggttaagcagaagatgcggagccgcagcgaaagcgagtctgaatagggcgcatgagtacgtggtcgtagacccgaaaccaggtgatctacccatgtccagggtgaagttcaggtaacactgaatggaggcccgaacccacgcacgttgaaaagtgcggggatgaggtgtgggtaggggtgaaatgccaatcgaacctggagatagctggttctctccgaaatagctttagggctagcctcaaggtaagagtcttggaggtagagcactgattggactaggggcccctaccgggttaccgaattcagtcaaactccgaatgccaatgacttatccttgggagtcagactgcgagtgataagatccgtagtcgaaagggaaacagcccagaccgccagctaaggtcccaaagtatacgttaagtggaaaaggatgtggagttgcttagacaaccaggatgttggcttagaagcagccaccatttaaagagtgcgtaatagctcactggtcgagtgactctgcgccgaaaatgtaccggggctaaacgtatcaccgaagctgcggactgttcttcgaacagtggtaggagagcgttctaagggctgtgaagccagaccggaaggactggtggagcgcttagaagtgagaatgccggtatgagtagcgaaagaggggtgagaatcccctccaccgaatgcctaaggtttcctgaggaaggctcgtccgctcagggttagtcgggacctaagccgaggccgaaaggcgtaggcgatggacaacaggttgatattcctgtaccacctcctcaccatttgagcaatgggggacgcaggaggatagggtaagcgcggtattggatatccgcgtccaagcagttaggctgggaaataggcaaatccgtttcccataaggctgagctgtgatggcgagcgaaatatagtagcgaagttcctgattccacactgccaagaaaagcctctagcgaggtgagaggtgcccgtaccgcaaaccgacacaggtaggcgaggagagaatcctaaggtgatcgagagaactctcgttaaggaactcggcaaaatgaccccgtaacttcgggagaaggggtgctctgttagggtgcaagcccgagagagccgcagtgaataggcccaggcgactgtttagcaaaaacacaggtctctgcgaagccgtaaggcgaagtataggggctgacgcctgcccggtgctggaaggttaagaggagcgcttagcgtaagcgaaggtgcgaattgaagccccagtaaacggcggccgtaactataacggtcctaaggtagcgaaattccttgtcgggtaagttccgacccgcacgaaaggcgcaacgatctgggcactgtctcaacgagagactcggtgaaattatagtacctgtgaagatgcaggttacccgcgacaggacggaaagaccccgtggagctttactgcagcctgatattgaatgttggtacagcttgtacaggataggtaggagccttggaaaccggagcgccagcttcggtggaggcatcggtgggatactaccctggctgtattgaccttctaacccgccgcccttatcgggcggggagacagtgtcaggtgggcagtttgactggggcggtcgcctcctaaaaggtaacggaggcgcccaaaggttccctcagaatggttggaaatcattcgcagagtgtaaaggcacaagggagcttgactgcgagacctacaagtcgagcagggacgaaagtcgggcttagtgatccggtggttccgcatggaagggccatcgctcaacggataaaagctaccccggggataacaggcttatctccccaagagtccacatcgacggggaggtttggcacctcgatgtcggctcatcgcatcctggggctgtagtcggtcccaagggttgggctgttcgcccattaaagcggtacgcgagctgggttcagaacgtcgtgagacagttcggtccctatccgtcgcgggcgcaggaaatttgagaggagctgtccttagtacgagaggaccgggatggacgcaccgctggtgtaccagttgttctgccaagggcatcgctgggtagctatgtgcggacgggataagtgctgaaagcatctaagcatgaagcccccctcaagatgagatttcccattccgcaaggaagtaagatccctgaaagatgatcaggttgataggtctgaggtggaagtgtggcgacacatggagctgacagatactaatcgatcgaggacttaaccacattttgaatgatgtcacacctgttatctagttttgagagaataagtttttcaaaaaaacacttgattttctcaagaatacatagtataatgttaaatgtcactgaaattgtctggtgatgatggcgaagaggtcacacccgttcccatgccgaacacggaagttaagctcttcagcgccgatggtagtcgggggttccccctgtgagagtaggacatcgccaggcagacttcattccgcagtagctcagtggtagagctatcggctgttaaccgatcggtcgtaggttcgaatcctacctgcggagccattattggagagctgtccgagtggtcgaaggagcacgattggaaatcgtgtaggcggtcaactccgtctcaagggttcgaatcccttgctctccgccactgatacttatacataattacaattgaaagtctgggcccgttggtcaagcggttaagacaccgccctttcacggcggtaacacgggttcgaatcccgtacgggtcattatatgatggaggattagctcagctgggagagcatctgccttacaagcagagggtcggcggttcgagcccgtcatcctccaccattatatcatcgcggggtggagcagttcggtagctcgtcgggctcataacccgaaggtcgcaggttcaaatcctgcccccgcaaccaaattttaaaatggtccggtagttcagttggttagaatgcctgcctgtcacgcaggaggtcgcgggttcgagtcccgtccggaccgccatttaaatacttaggctcggtagctcagttggtagagcaacggactgaaaatccgtgtgtcggcggttcgattccgtcccgagccaccacctatgccggtgtagctcaattggtagagcaactgacttgtaatcagtaggttgggggttcaagtcctcttgccggcactgttttttcaaaatttaatgtggaggggtagcgaagtggctaaacgcggcggactgtaaatccgctccctcagggttcggcagttcgaatctgcccccctccaccatttataggggcatagtttaacggtagaacagaggtctccaaaacctccggtgtgggttcgattcctactgcccctgccaaatttatgacatcttgagattatggcggttgtggcgaagtggttaacgcaccagattgtggctctggcactcgtgggttcgattcccatcaatcgccccatattatcattgggctatagccaagcggtaaggcaacggactttgactccgtcatgcgttggttcgaatccagctagcccagtctcactttttatatcaactgcatataatgtattaagtccattaaaaatgcggaagtagttcagtggtagaacaccaccttgccaaggtgggggtcgcgggttcgaatcccgtcttccgctccaattacggcggcatagccaagtggtaaggcagaggtctgcaaaacctttatccccggttcgaatccgggtgtcgccttcttattgccggggtggtggaattggcagacacacaggacttaaaatcctgcggtaggtgactaccgtgccggttcaagtccggccctcggcaccaattttacttacatggtaagttgaattggtgtttgtgttttatcattataactaatcatattaatgatctacttatgtagatcatttttttaatgctttgatttatcataacaagttaagttccgaggcctattataaagcggctgtatagctagtctttcaacacttttattttatatttccataaaaacttttttgaaatacgttgacactttatgagattcatgatatatttatattcgtcggttagatacgacgtaaaacttgccggtgtggcggaattggcagacgcgcacgactcaaaatcgtgttccttctggagtgtcggttcgaccccgaccaccggtatactgaaaaacccgtttcttaacagaaacgggtttttattttttattaaagaaaaggagccgaggctcctttttatacttactcagcgtattggtctaggatctcttctagcacctcttctagctcttctgtatcttcaagctctgattggctgaaacggacgcgtacaagctgttctccgtcattatacatctcttccagccaccctcggagtcctcttgctctgcggtcgacttcgaaaatgatttccaaaccgtcttcgtctaaaaggaaaatgagctctaattcatcaagcatctgacgataatatccggaagtcggaacgaattcgaattcttgaacaaacggaagacgacgctggaagtatggcgcttgttcgcagtctgcttcgttaagacggaagcccaggttttcgattgcttcaagcacattttcaatccaagggtgcgcttcaacgaaaatacggtcatgatcggatttatcgataccgccttgaatgtcaaggtctgtcaccacggcaacctctactttccctacagtgatcggcgtatctagaggcagagtgaatgtgaacggaaattgatgctcttcaccaggctgtatggtaaatgaaccagtgacccggaaagaatgaattgtagcgtatttccggtgctcttcatcgtcttttacaatgacataccgtgtgctaagctgtaaatcgatataacggatgtcctgagcgatttttccgcctttgacatgtaccgttccctgtacttcttctcctggaaaatatgcgtctttttctaaaattgtatctacttttgcagctccaattccggcacttgccgcaagcttcttaaaaaatgacatgttagatcttcccctttttcttttttctcaacagatatacgtaagaaggaggaaaaaagattcgtttgattcatacttttttcctattattcgtctcggcctagggacagactaagaataatattgaaaataaaggagtggatggaagtgaataaagaaagtttggttgcagatgaattacacagaatgtttttggccggtgagctgcaaatcacagtagaggaggatataaacagtatttccgaaaggctgagaaacggtgatctcagtttagaccgattaagcggtgaagacgcgtttataaaagaaacggtaaacgaggctttaagaagagtggagcaataaaaaagagacggcatctcatctttgagatcccgtctctttttgtggtctttactgcaagataaaagcgtaattgctcacccgagccaccccttttctaacagaagatctgacagttcatcatggagataaacagttgtatctaattgatcatgcaatgctcttctgatgtggggattttcggcttctgttattgcgacagtgtatttgttaatgctggtttttattgttgttaacaaatcaagaatatctttgggacaaagactttgttcaatgggaaaccacctcctttgttttttagcagctcctgataagaaagtatttggctttgtttcttgcttctatacaaaatgctataataagcaacaaattttgttggggggtgtgatgatgaagcagattattgcgatgggaggcgggggtttttcgatggagccggataatttgtccctcgatcaatatatcctcaatcaatcaaaacgagagcagcctcgtatttgttttttgccgacggcgagcggagattcccaaaactatattcagcggttttatcatgcatttcaaacattggattgcgtgccgtctcatttatctttgtttaagccgccatcatcagatttagcttcttttgttatggaaatggacgtgatttatgttggcgggggaaatacgcggaatttacttgtgttatggaaagagtgggggctggaccatattctcagggaagcatggaagaacggtgtggttgtagctggaataagtgccggtgcgatctgctggtttgaagaaggggtgacagatcagccggaccgctgacaagtttgaaaagtttaggttttttgcaagggagcttttgtccccattatgacggggaaaaggatcggagaccggcgctgatatctaacaagttcttatgcagtggctatgcagcggatgatggggctgctctccatttcataaatgatcagctgtttcagactgtgagttcaaggtcgggtgcaaaggcatatcgggtgatgatggctgaacatgaaatagctgaaatcccgttgccggtcaaatatttagggtgaaattggctgaatattatctatattcctctttttttcagattgattttatgataagatgagtgcgaaatcaatagttactgggggtgcccgctttcgggctgagagagaaggtaagcttcttaaccctttggacctgatctggttcgtaccagcgtggggaagtagaggaattgtttttgttattgtcttgctgggcaataatatgtttctttctgactgtaaccgggttcatttatatgaatccggttttttgtgctggttatgggcttgattttgtcctttcaaacgtagagaggggaaggaaaagtaatgcaaaacaattcagtgcagcaagccaacatttccattatgtcaagtttttcaggcagcaagaaggtatacgtggagggttcttcttcggacatccaagtgccgatgagggagattgcattgagtccgacgacgggatcgttcggcgaagaggaaaacgcgcctgtgcgtgtctatgatacaagcggaccgtatacggatcctgaagtaaccattaatattcaagaaggattaaagccgctccgccaaaaatggattacacagcgcggtgacgtggaagagtatgaaggtcgggctataaaaccagaagataacggttataaaaaagcaaatccaaacgtaagctacccaggattaaagcggaaaccgctgagggcgaaggcaggtcaaaatgtcacacaaatgcactatgcaaaaaaggggatcattacacctgagatggaatttatcgccattcgtgagcatgtgtctcctgaattcgtcagagacgaggtagccagcggccgggcgattattccttcaaacattaatcaccctgaaagtgagccaatgattatcggccggaattttcatgtgaagattaatgcgaatatcgggaattcagcggttacgtcatccattgaagaagaagtggaaaaaatgacgtgggccatccgctggggagcggatacgatgatggatctctctaccggaaaagatattcatacgacgcgtgaatggattatccgcaattgccccgtgcctgtgggaactgttccgatttatcaggcgcttgaaaaagtaaacggcgtagcggaggatttaacgtgggagatttatcgtgatacgctaatcgagcaggcagaacagggagtggattattttacgattcacgcgggtgttttgcttaggtatgtaccgctgactgccaaacggacaactggtattgtgtcacgcgggggagcgattatggcgcagtggtgtctggctcatcatcaagaaagctttttatacacacattttgaagaaatatgtgagattatgaaaatgtatgatattgctttctctcttggggatggtttgcgtcccggatcaattgctgatgccaatgacgaagcgcagtttgctgaattagagacgcttggagagctgacgcaaattgcctggaagcatgatgttcaggtgatgattgagggtcctggacatgttccgatgcataaaatcaaagagaacgtcgataaacaaatggacatttgtaaagaagcgcctttttacacattggggccgttgacaacggatattgctccgggatatgaccatattacttcagcgatcggagcggcgatgatcggttggtacgggacagcaatgctttgttatgtaacgccgaaggagcatttagggctgccaaaccgtgatgatgttcgtgaaggagtcattacatataagatcgctgcgcacgctgcggaccttgcaaaagggcatcccggagcgcaaatccgggatgatgcgttatcgaaagcccgttttgaattccgctggcgggatcagtttaatttatctcttgatccggagagagcccttgaataccatgatgaaaccctgcctgctgaaggagcaaaaaccgctcacttttgttccatgtgcggtccgaaattttgcagcatgagaatttcacaggatattcgggattatgcgaagaaaaacgatctcagtgaagcagaagctataaataaaggattaaaagaaaaagcaaaagagtttgtcgatacgggaagcaatttatatcaataaaaaaaatgaagatggagaatgctccatcttcattttttttagaaaaacagagagcgtcgaagcggcggaatactctgttcaaagcggaaaacattttctggatcatatttcgttttgacacggcggagtcgttcaacgttttcgccgtaatatgttcttggccagtttctgatttcgatatctggccaatttacgtagtctcccatcgtttctctcgaaagggacgttctcagcccctcaatccagcggacattttgtcttttttcttcaggagatgtccagtttgttaagtattcctgggcgatgattgcatcacgataataaaatgccgtttggtcgggagcgatccgtccggctgccccgccgagtgcttgctgccagacactggcgttttgattcggagcgtgctctaaaaagtgttttattgttgagatcggacgttctgataatggcttttcaatgaaagagccggagcgtttcattttttgaggctgattgcctcccgggctgttaaaaaaggttaccgcttcgatgaacggcattgtttttaccattccgcttgttgggcttcctgctttcaataaagtctttaacagtttttttaactctgtttttggcccgacaaattggccgagggcttctatgcggtttacttctttaggccaaaactctattgatgatgtaagccggtcatctgtatacggggcccagtgctgccacgtgttaaatacttcctcaaaatcatcccatccccatgtaatagaaaaaatcgacacttgagagatgggcactgctttaaatgtcatggaggtgactatgccgaaattgcctcctccgcctccctgagacgcccaaaataagtctggatgatttgaacagctgactgtaatcagatcagcgccctctttttcgtctgctacgatcatctcaagctgcacgaggctgtcgcaagtaaggccggcagcccttgttaaaagtccaattcccctccgagagttaaacctgtgagccctacattggcaatggtgcctgcgggaagcgtcaggccgtattgccagagtgtccgatagacttctcccaattcagcccccgcttcaatataggccagctttttatcctgattcacagttatttttttcatttcgcttaaatcaataacaagaccgttatttaaaagggaaaagttctcatagctgtgtctgccgcctctaatacggaaaggcacacggttttcacgcgcccatttcagcgcattgagtgcatcctgtttgttttggcaaaacacaatgatgtcaggatacctttctaagcttaggttaatattggttcttgcttcgttatagtccggatcatcccgtgtcacgatacgtccggtcaattttgtcttttccacactcccacatctctttctctcgtattctagtttctctagcttatgcgtcaagggaaaagagtgtataaggaaaaagcggggatgcaatctgatacagtgtcaactcccttaaaaaatagttgacaggtcggtattgtatgaattaacatggtcagtacaaatttttcaaatttatcgcgctgatcggaacaccgaaggctcttatcgtttagataagggccttttttgtatgaaaaaggagggattattgatgggagtcaaaaaagaaaaggggagaaaacgattcagaaagcgaaaaacctacgggaatcagattttgccgcttgagctgctgattgaaaaaaacaaacgagagattataaacagcgcggagctcatggaagaaatttatatgaagattgatgagaagcatacgcaatgtgtaactaaatagaaaaaaacccgctgattacagcgggtttttgcatttctacattaagcatcttttttaatcggcaatccaaggccttctgccacgcgttttccgtattcaggatccgctttgtagaagtgctcgatttggcgcagtttgatttcttctttttctaccggcttcatagcattaacgatattttcaacaaggcgggtacgttcatcttcactcattaaacgatacagatcaccggcttgagtgtagtgatcgttgtgatcgtagcttacgctgtcagcgatgccttgtaccggatatgctgcttgcttatcctcaggtgactcttttggaccgccgaagctgttaggctcgtaatacacagatccgccgccgttatcatcaaagcgcatttgtccatcacgctgataattgtttactttgttgcgtgcgcggttgattggcagcgcttgatggtttgcaccgacacggtagcggtgtgcatcatgataagcaaacagtcggccttgaagcattttatccggtgaaacatcaataccaggcacgagtgttccaggtgaaaatgtcgcttgttctacctctgcaaagtagttttccggatttctgtctagaaccatgcgtccgacctcgattaacgggtagtctttttgagaccaaacttttgtgacatcaaacggatcgaaacggtacgtgtttgcatcttctaaaggcatgatttgcacatatagtttccatgcaggataatcaccgttttcgattgcattgaaaaggtcttctgtatggtaatcagggttttcaccggcaatttttgctgccgtattgacatcaaggtttttcacgccttgttccgttttaaaatgatatttaatccatacgccttcgccttcggcatttgtccatttgaatgtatggcttccgaagccgtgcatgtggcgaagtgttgcaggaattccgcggtcagacatcaggattgtcacttggtgaagtgactctggtgaaagtgaccagaaatcccatacagccgttgggtttttcaggtgtgtttttggatctcttttttgtgtatggatgaaatcagggaacttaatcgcatcgcggataaagaatacaggcgtattgttgccgacgatgtcgtagtttccttcttcagtataaaatttaacagcaaatccgcgcgggtcgcgaactgtgtcagcagagccaagttcaccggcaactgttgagaaacggatgaacaacggtgtgcgtttgccgacttcagaaaggaaagcggctttcgtgtattttgttacgtcgtttgtcacttcaaaatatccgtgtgcgcctgctcctttggcgtgaacaacacgttcaggaacacgttctcggttgaaatgggccaatttttcgagtaaatgtacatcttgaattaaagttggtccgcgagaaccggcagtcattgagttttgattatctccaaccggagcgccccagctagttgtcagtttatttgaactcatgttatcacctcttggaatttataagaacataatatcatctctaagtaaaaagtcaatattattttataattattataaaatagttatctctattaagcgatatctagtattgaaagtgtggaaaaaccttgttggaacagctttttatggcacttgataatttttgaagaaataatttttccttctctatttgcgaaacaagcagagtaagtgataaacaaggatatcaaaaatcgtatttaaaaaagagttgacatatcggaataatttgaattaacatgttattcaaacaaaaaacaattgggcagctgatcggaccgccgaaggctctcatctctacaagaacagagatgggggcctttttgttttttttgaaggcggggttggcagaaagagagggataaaagtggctgtgaccatcagcatcaaagaaaaggcatttgttcaagagggccgcaaaaacacggtcttagagaacatagaattatcaatcgcaccaggcgaatttctaacgcttatcggaccgagcgggtgcggaaaaagcaccctgttaaagattattgcagggcttgattctgaatatgacgggagtgttgaaattaacggccgcagcgtaacagctccgggtattcagcaaggatttatttttcaggaacaccgcctctttccttggctgactgttgagcagaatattgcagccgacttgaatttgaaggacccaaaagtcaaacaaaaggtggatgaactgatcgagattgtcagattgaaaggatcggaaaaagcatatccgcgcgagctgtcaggcggcatgtcacagagagtagccatcgcccgggcccttctgcgggagcctgaggtgctgcttttagatgaaccgtttggtgcactcgacgcttttacaagaaaacacctgcaggacgtgctgctggatatatggaggaggaaaaaaacaacgatgattctcgtgactcatgatatagatgaatctgtttatttaggaaatgagcttgcgatccttaaggccaaaccggggaaaatccataagctgatgcccattcacctggcgtatccgcgaaaccggacgactccggatttccaagcgatcagacagagagtgctgtcggaattcgagaaaacagaagatttggagtacgcagaaggatcagggatatagaaagggcggaagcggaaatgaaaaaaggactcattgtattggttgccgttatttttctgctcgcaggctgtggagcaaatggagccagcggtgaccacaaacaattgaaggaaatacgtattggtattcagcaaagcttaagcccgcttttgatcgcaaaagaaaaaggctggttcgaagatgcatttgaaaaagaaggcatcaaagtgaaatgggtggagtttcaaagcggtccgccccaatttgaaggccttgcggcagacaaacttgatttttctcaagtcggtaattcgcctgtgatcgctggacaggcggcaggcattgactttaaagaaattggcttatctcaggatgggttgaaagcgaacggcatccttgtcaaccaaaacagcggcattcaggacgttaaggacttaaagggaaagaaaattgcagtcgctaaaggcagcagcgggtttgattttttgtataaagcgcttgatcaagtggggttgtcagctaacgatgtgacaattattcagcttcagcctgatgaagcagcttccgcatttgaaaacggatctgttgatgcctggtccatttgggagccgtacttgtccttagaaacaatgaaacacggggcaaaaatccttgtgaacggagaaagcacagatttatattccccgggttttactttagtaagaacaaagttttcagaggagcatccagacgaagtggtccgttttctgaaggtgtttaataaagccgttgtatggcaaaaggaacatctggatgaagcagcggacttgtattctgacattaaagatctcgataaaaaggtcgtcgaaaatgtgctgaaaaatactgaacctctgaatgaggtcatcagtgacgacattgtgaaagcgcagcaggaaacagcagattttcaatttcgaacaaaggcgatagataagaagattgatgtgaaggatgttgtcgataacacttttatcaaaaaagcattaaaggaacattcctcaggaggtgatcaatgatgaaagcagaggctgcgggctcgctgcccaaaacgaatgcggaagcggtgcgaaaaaagcccggaaggaagagatacggctggatgaaggggcttttactgcccgctgtcatcattgccatctggcaggtcatcggcgggctgggggttgtgtccgctacagtgctgcctacacctgttacgattgttctgacctttaaggagcttattttgtccggcgaactgttcggccatctgcaaatcagcatttatcgggcggcacttggttttttgcttggcgcggggcttggattgatgatcgggattttggccggattttccaaacggacggagctgtatcttgatccgtcgttgcaaatgcttagaaccgtacctcatctggccgtcacgccgctgtttattttatggttcggatttgacgaagtatctaaaattttgctgattgcgctcggtgccttctttcctgtctatatcaatacgtttaacggcatccgcggggttgacgcgaagctgtttgaagtcgcccgggtgcttgaatttaaatggcatcagcagatatccaaagtgatattgccggcagccctgcccaatatattgctaggcattcgcttatcgctcggcattgcatggctcgggctcgttgtggcagagttgatgggctcaagctcgggagtcggctatatgatcatggatgcgagacagttttcacaaacgaataaagtctttgcagggattatcatttttgcagtggttggaaagctgacggattccttcgtcaggctgctggaacgaaagctgttaaagtggagaaacagctacgaaggataaaagatataaaggggagatgaatatggaaattctttggtttataccaactcatggagacgcgagatatttaggatctgaaagtgatggacggactgcggatcatctttactttaaacaagtcgcgcaggcggcagacaggctgggatatacaggagttcttctgccaacgggaagatcgtgcgaggacccgtggcttacagcgtcggcactggcaggagaaacaaaggacttaaagtttttagtcgcggtaagacctggtttaatgcagccttctctggcagccagaatgacatccaccctagaccgcatttcagacgggcggctgctgatcaacgttgtggcagggggcgatccgtatgagctggcaggcgatggcctgtttatcagccatgatgagcgctacgaggcaacagacgaatttttaaccgtttggcggagacttttgcagggagaaacggtttcctatgaaggaaagcatataaaagtggaaaacagcaatctgcttttcccgccgcagcaagagccgcatccgcccatctatttcggtggttcgtcacaggctgggattgaagctgccgcaaagcatacagacgtatacttgacatggggggagccgcctgaacaagtaaaagaaaagatagaaagagtcaaaaagcaagcggcaaaagaagggagatccgttcgatttggcattaggctgcatgtcattgcccgtgaaactgaacaagaggcatgggaagcggcagagcgcttgatcagccacttggatgatgacaccattgccaaagcgcaggcagctttgagccgttacgactctacaggccagcagcggatggccgtccttcatcaaggcgatcggacgaagcttgaaatcagtccgaatctgtgggcggggatcggcctagtcagaggaggggcaggaacagctcttgtcggtgatccgcagacgattgccgaccggatagcggagtaccaggcactcggcatagaatcgtttatattctcaggctatccgcatttagaagaagcgtattattttgcagagcttgtatttccgcttttgccgtttgaaaatgatcggacgagaaagcttcagaacaaaaggggagaagcggtaggaaacacttattttgtcaaagagaaaaatgcatgagtttaataaaaatacagcccccaaacatggtatgatattcaaaaaaagggggctttttttctgaaaacattgagaagcgcggcagtcatttgcctcatagctatgctgtcagcatgcggacattcaaaacagatggaaatcaaagcggcggacatatcagaacttgaaaaaaacagaatggatgtcgcagcttcacaggcattcactgccgaagccgtcaatatcggtgaaggtgtttcttcagctgacatgtacatcgaacattatcaaaagggaaagcttgttgagaggtttggaccggctagtgcagattattcagaggaaaaacccgataccatacaatttgtttattttgagaaggaagagggggaaggaaagaataaacataccaccattcattttggcattgtggataaacagggaaatatagcggctgattcatcggtgaaacgtgacgatagcacaacacaggaaatgactcagaatatttcatcgccggaaccgattactttcgagaagcctgctttgatcggcagcagtattagagggactgacgagacaatgcacacctctgaacataaaaaagagctcattaagcatcaagatgcgttactgtattatgtggaattgcatcattagaatgggcggcttcaggccgtctgttttacaaagcggtatgcttgcttttttgaatggtgcatgatacattttaaatagtaacaatttcgatttaaagggaggctatgtgacttggctaaaaaatcaaaagtggcaaaagagttaaaacgccaacagcttgttgagcaatacgctgatattagacgcgagttgaaggaaaaaggagattacgaggcactcagcaagctgccaagagattcagcaccgggaaggcttcacaaccgctgcatggtaacggggcgcccgagagcatatatgaggaagtttaaaatgtccagaatcgctttcagggagctggcccataaaggccagattcccggtgtgaaaaaagcaagctggtaagaaaaaactccggccgattacagcgcgccggagtttttttcgtttttcttgaaagagatgacgtaggaaaggtgctggatgatcatgatgataaacacaataataatagggaaaaacggaatacgcgattgaaaaagcggataaaaaatgagaagaaccgctgcggcaggcagcgagaagtagacagcgatatatgacgcgcgacatgcttttgccgtcatcatctgctctctttcatcctgctcttcaaactcatcaggcagaagaagctgctttctggcagggcggctttttttctgtaagtacaaataaaccgcaaacgccgcaacaaacagaataaagggggtgaggtttaattcaaataccatcccgccgctctttgtgccgaaaaaagatgctatgccttctgaggcttcaaagtatgaaatcagcgcccagcatgcaaggccaaataaaacaaggtgaaaagctgcttttgttttcatgctcatcttagttttcctcctctaaccaaaagacatcctccattttcatggagaaggctttgcagattttcagtgctaacagcagtgagggaacataatcgcctttttcaatcgctgccacagtctgtcttgtgacgccgaccgtttctccgagtttttcctgagaatagccgaagcgtgccctcagctcttttactttatttttcatcatgacgtctgtccccttcacaatctcgattgattatattgtatagtatacttaacattatgtaaatggaacttaacaactttacaaaaagataactttttttcgacaaaatttttatattcccttgacgaaaaataaataaacatgtaatataaaaaaagtcagagcggtactgttgctgacaatcacaaatgcgggtgtagtttagtggtaaaacctcagccttccaagctgatgtcgtgagttcgattctcatcacccgctccatacatacgttattaacgcagtgtttcgtttctcagataaacgaagtattgcgtttttttatgtaaaaaagaacacgacattcgtgttcttttacgtaagccaatgtactgtatgggtgccgccgtgaatttgttcaaacattttcgttaatgatgataagaggttaacagcgctgcttttctcaatcgatggcgggaaaaaaatgatttgcagcatattcttagtctcgtttgaaacgggatagtggttgacgctgtttttgaaatcgccaaaaatgccgttttcatcagagaaaagcagtatgttttctttttctcccaatgagatccggaccggctcatgaagctttccggcatcataaatcataataggcagagaatattttaatgcgaaaaaatcgattgtgtcatgggccgagtctttactttccatgaattgttccttggatatcgggaccagcatgtcctccattggggttgtttctccctcaaatgaagggttaagctgtttaaagagtttctgccattccttgacgaaggattcatcggatataccgccgtccgcatagtcgaaaaacaaggattcttgaaacaggcggagtctgcctttcagcatttgcggtgaggagccgacttcgatattctcataaatgacagcagctgcatgtaagccggccgcacgttcagtaataacagaatcaagtttgatattcactagcattcactccagttacgtgatatcaacctattataaacgctgtatcgttttatcacaaagaaaggaggctgtgcaaaacatgaacgtttatcagctcaaagaagaattaattgaatacgcgaaaagcattggcgtggacaagattggttttacgactgctgatacttttgacagtttaaaagaccgtttgattcttcaagaatcactcggctatctctccggctttgaagagccggatatcgaaaaaagggtgacgccgaagcttcttttgccgaaagcgaaatcaatagtggcaattgctctcgcatatccttccagaatgaaggatgcgccgagaagcacgagaactgagcgcaggggcattttttgcagagcttcctggggaaaagactatcatgatgtgctgagggaaaagcttgatctactggaggattttctaaaaagcaagcatgaggatatcagaacgaagtcaatggttgatacaggtgaattgtctgatcgcgccgttgcggaacgtgccggaattggattcagtgcgaaaaactgtatgatcacaacacccgagtatggctcttatgtgtatttggcggaaatgatcacaaatatcccttttgagcctgatgtgccgattgaagatatgtgcgggtcctgcacgaaatgcttggacgcctgcccaacgggagcactggttaatcccgggcagcttaatgcgcagcgctgcatctcttttctgacccagacaaaaggatttttacctgatgaattccggacaaaaatcggaaaccgcctgtacgggtgcgatacgtgccaaacggtatgccctctcaataaagggaaggattttcatcttcatccggaaatggagcctgatcctgagattgccaaaccgttattgaagccgcttttgaccatcagcaatcgggaatttaaggagaaattcgggcatgtctcaggttcttggcgcgggaaaaaaccgattcagcgaaacgccattctcgcgcttgcgcattttaaggatgcttccgcactgcctgaattgacggaactgatgcacaaggatccgcgtcctgtcatcagggggacagccgcatgggcaatcggaaaaatcggagaccccgcctacgcggaagagcttgaaaaagcgctggaaaaagagaaggatgaagaggcaaagctggaaattgaaaaaggaattgagttgctaaaagcttcaggcatgactaaacaaggcctgtcctgacatacgtatagagcagaaggaaaaaacacttgagatcatccaagtgttttttctctataaaaaagtatggcgggtggggtgagcttgaagtacattttagaacaattagcggaggagcggctgggctttctggttaacgggcatgctatgagacaggagtctcaagtcggagaccttaaagtcatggagcgtaagaaaaagcttctggaaaaacgtaaagttgacatcataaaagcgaaagcaaaggccgtgattaatcatgtgcgggttgaggatgacggaacgacctgcctttcgtataccatccattacgaatacgtgtgtaaggaacaagatgacagcttgtatatagaagagcacatagaggagcgaatggctttcctgtatgatcacattttgattagtgatcaggaaattgcgaaaaagccggctggatttcatgaagggaccagtattattgactattctgaagctgaagaggaaagagaagcgtttggcagggcttttcaatacgatcgtctcggcgctgtccaatatgccgagaaattttggaacaagcgcaatcctgcttataaaaatttcagcgataactgtacaaattttatttctcagtgtcttcatgcaggaggcgcgccgatgcgcggtcatccgaacaggggatcaggctggtggatgaaacaaagctcatggagctacagctggacggtggcgcactctatgaaaatgtatttgtcgaattcaaaggccggactgcgtgcggtgcgggtgaaatcagcggaagaactgatgccgggcgatgtgatttgctatgacttcgaaggagacggccgctttaatcatacaacgattgtcgtggcaaaggacaaaggcaatatgccgcttgtcaacgcccagacctatgacagcaggatgaggtattggtcatatgaggattctacggcatacacgccgtcaatacgatatgccttttttcatatcgttgatgatacgacaaaagagtaattaatgttataatgatgggcggataagaaaaacagaggtgaacattgtggcattacatgtcgttttatatcaaccagaaattcccgctaacacagggaatattgcacgtacttgtgcagcaaccaatacaacgctacacctgattcgtccgctcggcttttcaacggatgataaaatgctgaagcgtgccggactcgattattgggagtttgttaacgttgtgtatcatgattcgttagaagaattgtttgaggcatatgaaaaaggccagtttttctttattacaaaattcggccagcagcctcatacatcatttgattacactgatcttgacgaggattatttcttcgtgttcggaagagaaacaagcggtttgccaaaggatttaattcaaaataatatggaccgctgcctgcgtcttccgatgacagagcatgtcagatcgttaaatctgtccaatactgccgcgattcttgtttatgaagcgctgcgccagcaaaattaccgtgatttaaaatagtgaaaaaacccgctcatcgatgatgggcgggtttttttgcggatgttgaaatgctttgtttcgtttttgggcttaacaacgtaacagtgttatgttacaatgtacccatcaaaggagctggacttatggaagaacaattaatctctaaaaaagaattacttgaaagaacatcgatttcatacggtcagctgtatcgatggaagcggaaaaacttaatacctgaggaatggtttattcgtaaatccacatttacagggcaagagacgttttttccgagagaggagattttaaaacgtatatcaatgattcaaaagatgaaagaaaatttgtctttggatgaaatgagggaaatgctgtcgccgaaaatgaaggatgtcagcatgaccgctgatgaattgcttcataaaggtttggtttcaaggcctgctcttgaagcctattcagaagacggaggaagtccggttttttcatccagcgatttgctttcgctatatgtgcttgagggactgctgcagtctggaaatgtcagccttgcagaagcaaaaatggctgcagaggtattaaagaagcatgataatgaagagattgaaaaacagacggagctgattgtgctccgcaagctcggtgtcacaacttgttttatagcggctgcggcggacagcattttgtttgaatcatccgtaaaggttgtggaacgggtagatttattaaaagcttcagaggaattaaaaacaacatttatgcaggagggccatcgatggatgtagtggaaaagctggtgataaacggatcaggaagttcaaagggaggaacatttcaatctgttgagattaatggcagcgggacagtggccggggacgtggagtgtgacactttttcttttaatggaaacggaaaagctgacggcagcgtcaaagcgaaagcggtaaccatcagcggttcaggaaagatacatggagacgttgaagcagaatctatccggatgaatggcacttgttttattcaaggagaggtatctgcaaaacaattgaaaatcgctggatcatcaacatttggcggcactgtcaaggctgatggcattgacattagcggaaaagctgtcatggaagcagattgtgaaacagaaacctttcaatcagaagggaaatgcaaaatcagcgggcttttaaatgcagaccaggtgatcattaagctttctgcaggggaaagctatgcgcgggagatcggctgccgccatcttcaagtgacctgcagaaaaggaatgctgacattgctcagattgatgccgcagcctgttctaacagcagagctgatcgaaggtgacgtgattgaattgacaaatacaaaggcgaaaaccgtgcgcggaaataaagtgatcatcggcccggattgccagattgaaaccgtcgaatacagcggggactatacctgtgatccaagcgcatcggttgaaacatccacaaagttgtaaggaggatcgtaatggagacaacaaaactgggaaatttaaaattatatggcgctgggcatgccgcaggaggcgcgtatcacaatgtcagcatcaaaggagaaggtgtagttggagaagggttgtctgctgtaggctgccgcatatacggaacgggcctttttctcggaaaagcagagactgagcggctgcgtgtgctcggagaaagtgaatgtaaaggcgatctgacagccggcaaaatcaatatatatgggataatgaaagtcagcggctcacttcaatttgatcgattcaatctgaaaggccagactgaaattggcgggaatatgactggagaatcctgcgatgtgaaagggaagcttagcgtaaaaggtgattgtgaaacagaaatgttccatgtcacaggctgtgttgatgtatcggggttattaaattcgggtgagatcaagctgggattgagccatgatataagccatgtgcaggaaatcggcggaacaacaattacagtgaaaagacgcgcgagtttttttaatcggaagaaagtgaagctgatcgccgatgtcatagaaggcgatcgggtttatttggagaataccgaagcggcagtcgtcaggggaaaagaagtgatcatcgggccgggatgcagtatcggaacaattgagtacgaaaacaaatatgaatgcgatccgcattcacagattaaagaaaaaacaaaactgtaaaacattgttctgttatacaaaaagggtgctctttcaggagcacccttttttattcttttccaggcttgctttcgtatcctgcggtaaaaattgatactaaaaaagtgacaatgacacccatcatgatgattgttttcaccgtctctccccctcttcaatttttccgtgctgtccgagtctggatgattctgtatttttctttattatgaacggtcgcagtctgccttgtcaacgatgtataagtatctttatttttaagaaaccaaagcatgtatcacgagatggcggcatagattgtatcaaagtaccttatttgcatagtgtatcaaacatgatagaggaggtccttatggatatattaaagaaaattgaacagtacagagaggaagagcagcggctgaaatgggaaggaactttcgccgattatttggagattattaaagaaaatccgatggtcgcgcaatctgctcattctcgagtttttaatatgataaaagacagcgggatagaggagattgacgggcgcaagaagtacagtttttttgaccgcgagctgttcgggcttgaagaatctctggagcgtcttgtggaagagtattttcatccggctgccaaacgtctagatgtcagaaagcggattctattgctgatggggcctgtgagcggcggtaaatccacgctggtcacaatgcttaaaaaaggtctcgaagcgtacacgctgacagataatggcgctgtatatgcgattaaaggctgcccgatgcacgaggaccctctacatttaatcccccatcatttacgcgatgacttttacagggaatacggcattagaatagaaggaagtctttctcctttaaatgtcatgaggctggaggaagagtacggaggaagaattgaggatgtgaaggtggagcgtatcttcttttcagaagataagcgtacgggaattggaacattcagtccctctgatccgaaatctcaggatattgccgatttgacggggagtattgatttctcaacaatcgccgagtacggttcagaatcagatccgcgtgcttatcggtttgacggagagctgaataaagcgaaccgcgggatgatggagtttcaggagatgctgaaatgtgatgagaaatttctctggcatttgctttccttgacacaggaagggaattttaaagctgggcggtttgcgttaatttctgctgatgagctgatcgtggctcacacgaatgaaacggagtttcgctcatttatttctaataagaagaatgaagccctgcactcaagaatcatcgtgatgccggttccttataatttaaaagtgtctgaggaagagagaatttatgaaaaaatgattgcagaaagcgatgtggcggatgttcatattgccccgcatacgttgaaggtcgccgcgatgttctcaatccttacccggttaaaagagccgaagcggtcggatattgatctggtcaagaaaatgagactgtatgatggggaaagtgtggaaggatataactctgtcgacgttgaggatatgaaaaaagaatataatgatgaaggcatgagcggaattgatccgcggtacgtgatcaaccggatttcttcaacgattatcagaaaaaatatggaatcgattaattctctcgatgtccttcgctccttaaaagaaggtcttgatcagcacccatcaatttcaagcgaggacagggagcggtatttgaattttatttctgccgcccgcaaggaatatgacgatattgcgaaaaaggaagttcaaaaagcgtttgtttattcatatgaagaatcagcaaaaacacttatggacaattacctcgataacgtagaggcctattgcaataaaaacaagcttcgtgatcctttgacaggagaggaaatgaaccctgacgaaaagctgatgagatccatcgaagagcagatcggcatttcggaaaacgccaaaaaagcgttccgcgaagaaattttaatccgcatctcggcctatgcgagaaaaggcaagcggtttgattacaattcccatgaaagactgcgtgaagctattcagaaaaagctgtttgctgatctgaaggatgtcgttaaaattacgacctcaacaaaaacgccggatgagcagcagctgaaaaaggtaaatgaagtcgtggcccgtttaattgatgagcacggctacaactcgacgagcgccaatgagctgctgaaatatgtcggcagcctgctgaaccgataagcaacgtgacccgtccgaatagggcgggttattttgtcccattttctaaatagtttgtcaattaaacgtgcatatgtgcatatgatgaatataaatcttttcaaaagacttgtttcataatctggcacaagccggaatacgtatgtatcacgaccacaaatggttaaggaggggaattcatgtcccaaaatgacagcggccattttttgatttctgaggaaaactggtccctccatcgcaaaggcttcgatgaccagcaacgccaccagaaaaaagtgcaggaagcgatcaaaaacaatcttccggacctcgtaactgaggaaagcattattatgtctaatggaaaagatgtagtgaagatcccaatccgttcacttgatgagtataaaatccgttataactatgataaaaataaacatgtagggcaaggagacggcgagagccaggttggagatgttgtggcccgggatggatcagacaaaaaacaagggcctggaaaagggcagggtgccggtgatcaggcaggcgaggattattatgaagcggaagtttcattaatggatttagaagaagcgctttttaaagaattagagcttccgaatctccagcaaaaagagcgggacaatatcattcatacagatatcgagtttaatgatatccgtaaaacagggttaaccggtaatattgataagaaaagaacgatgatgtcagcctttaaacgaaacgcaatgtcaggaaaaccgtcgttctacccaatttatccggaggacctgaaatataagacgtggaatgacatcacaaagcccgaatcaaaagccgtcgttttagccatgatggatacaagcggcagtatgggggtttgggaaaaatacatggccagatgcttctttttctggatgacccgttttttgcggacaaaatacgagactgtggaaattgaatttattgcccatcatacagaagcaagagtggtctcggaggaagattttttctcaaagggagaaagcggcggaacaatttgttcttccgtatatcggaagtcgcttgagcttattgatgaaaagtacaatcccgcccgctataacatttacccgtttcatttttctgacggtgacaacctgacatctgataacgcgcgctgtgtgaagctggtcaatgatattatgaagaaggccaatctgttttgctacggcgaggtcaatcagtacaacaggcattcaacgttaatgtctgcatataaaaatgtaaaagatgagaaatttaagtactatattttaaaacagaaatctgatgtttttcaggctctaaagaactttttcagaaatgaagagtctggtgtaagccatcaattttcgtaatgaaaagcccatttcagggcttttttttatttaataaaagcaagaaaacgcttgcgaaaaaaatacgggagaaaaagaaatttttcctttgacaaatcttctttcatttattaatattttatcttgtgaactattattgaggaatgaggtgaaaaggagttgactgaatcagaacgtgctttgctcacttttgaacagctcttcgatacgtctcgggcgatatataaaaaacagaagaagatattggagattgtgcttgagccttttgatattacagtccttcaatatttgctgatgtttaaaattcatcaaagcggaagcaccccgctaagcaagctggcaatgtcgcttgatcttaagcctgcttctgtgacgcggatgacagatattctgtataagcgccaattgatgaatcgatatgacagtccggatgaccgccgtatcgtcatgattcagttaaccgaagagggggaagaactgatagaaaaagccgctgtgcaatatgcaaaaatgggtgctggcttgtaccaaaagcttgatacctcccagctgcagtatttgcgcaaactagccggaagcttaacgaagcttgctgaaggctgttcagaaaaaagcggtaattaaaaacttctcacatattttcaccagctttccgcaaaatgatagaggatgaaacgaaaggagaaaacaaaatgaacagaggacgtttaattctgaccaacattatcggtttgattgttgttcttgcaattatagctggaggtgcttactactattatcaaagcacaaactacgtaaaaacagatgaagcaaaagtagcgggcgatatggctgctattactgctccagcggcaggtaaagtatctgactgggatctggacgaaggaaaaacagtgaaaaaaggcgacacagttgcaaaaatcaaaggcgaacaaactgttgacgtaaaatccattatggatggaacaattgtgaaaaacgaagtgaaaaacggacaaaccgtacaagctggtacaacaattgcacaaacgattgacatggacaacctatacatcacagcaaatattaaagaaacagatattgcggatattgaagtaggaaatagtgtagacgtagtagttgacggagaccctgatacaacatttgacggtactgtagaagaaattggctatgcgactaactcaacttttgatatgcttccatctacaaattcaagcggaaactacacaaaagtaacacaaaaaattcctgtgaaaatttcaatcaaaaacccatctgataaggtgcttcctggaatgaatgcatctgttaaaatttctgagtaaaacagatcagtcatcaaaccatgaaaggaggttgtcttagatggctacaggcaaagaaaaaaatgcaaaaaaccctatgtcattgctgattgtgctaatggcgggtttatttttggcaatcctaaaccaaacactgcttaatgttgcaatgccgcacttaatgactgaatttggcgtaagtgcaacgacgattcagtggcttacaacaggttacatgcttgttaacggtgtattgattccgttatctgctttcctgattacacgatttggccaacggagtctctttctcgtcgcgatgttttgttttacgctcggtacgttagtctgcggtatcgcacctaacttctctacaatgctgatcggccgtttgattcaggccgtgggcggaggtatcttgcagccgctcgttatgacaaccattctgttaattttcccgcctgaaagcagggggaaaggaatggggattttcgggctagcgatgatgtttgctccagcggtcggcccgactctttccgggtggattattgagcattatacatggcgcattatgttttacggtcttgtgccgatcggcgcaattgttatcattgtggctttcttcatctttaaaaatatggtggagccgcaaaaaatcaaactcgatactcttggcgcaatcctatcgattgtcggattcgcctccttattatacggagtcagtgaagccgggtctgacggctggaccgacccgattgtattgtctacagttattatcggagccattgcaattgttgcttttgttgttcagcaattgcgtcatgatgatccgatgcttgatttcagagtgtttaaatatgacattttctcactctcgagtgtcattaatatcattataacagtggcactttacactggtatgttccttttaccgatctatctgcaaaacctggtcggctttacggcgcttcaatccggtctgcttctgcttccgggtgcgatcgttatgctgattatgtcaccgatctcaggtattttgttcgataaattcggaccgagaccgcttgcgattatcgggcttctcgtgacagtggtaacaacatatcaatacacgcaattgacaattgatacaccatatacacacatcatgctgatctattcaattcgtgcatttggtatgtctctcttaatgatgccagtcatgacagccgggatgaaccagcttcctgcccgtctgaacagccacggaacggcgatgagcaacacgcttcgccaaatcagcggatcaatcggaacaagtttaattacgacgatttatacaaaccggacgacattccattattcacaaattgcagataaaacaagcacggcggacccgaacttcctccatgcgttccaaaatgcagtttcgaatttaatggtgaatatgaatgtgtcttatgatacggcgaaaacatatgtgtactcacatatttataaacacgcgtcactcgattccaatgtcatggggataaatgatgcctttatgtgggcaaccttattctgtgtagcaggtttgattttaagtatcttcctgcgtgacgtcagaaaagataaattgcgtaagaagaaaaaagaggagctttcattacttcctgctccaaaagaagctaaggaatcttaatctgtacagggaggtttcctgaatgaaaatttatgtagtgtatgatagtgaaggcgaacatactaaagtgcttgcagaagcgattgctgaaggcgcgagagaaaacgacgcggctgaagtgttcatcgaccatgtagatcaggctgatatccgcaagcttaaagatatggatgcgattatttggggatgcccagggcatttcggaacaatcagctccggtcttaaaacttggatcgacagacttggctacttgtgggctgaaggcgagctgatcaacaaagtcggtgctgtcttctgcacaacggcaacaacacacggcggcttggaaatgacaatgcacaatttaatcacgccgatgttccaccaaggcatgattgttgtcggactgcctggcaacgtgcctgaaaacgcactttatggctcttattacggagcaggtgtcacttgtccggtagacagtgatgagttaatgtctgaggaaggtattcagcttggacgcgcgttgggaagacgtgtcagccaagtcacaggaaacctaacagcaggacagtaaggagaggttgaaatggccattattatagcaataattgctgctgtcattgtcattgcggcccttattacatttaacgtccgcaacgcctcacctggacctgagaagcaagaagcaaccgatagaatcgcacctccagaagagggaaaaaacgaagcgcattaccctgctgaagcaagggctgccgagcatacgccatccgttgtcaaaaacgattctccaaaagagaagcgtgacacaatgggtgatgatatttacaggcaggcgctgcaaaagtttaagcattctgatgaagttcatgcagaagaagaggtcactgaggaaagtgacaaaatgcaggaccgcagctatcgtgatgcgctgctctctatgaaaaataagaaaaagtaatgaaaaaggcaaatccgttttctcatgcgggtttgccttttttgctgtttccatcaattcggtttttatcaaataaatccatggaatatgttgtattccatcttgatctagtgtactatgttactcatacaccgagggttttttctgggaggtaaagacatgaattcttttttaggtttattaaagaaagatatcaagctttcaagaatgtggctgctagtatggatatgcggaatcattttcttattgggaacaggccatattatagcttctcgcacgaaagaacctctagtcatttttggtttttttgttgcagttgctttttttctgcttttcttatctcctgtttttgtgttttatcaccttcgcaaggaagggaaatcacagctttggctgtacaatccaaatggcggcttctggctgttttcttctaaattggcagcatctttgctctatcaatttgtgattcagttggcattaacagcctatggcatatggatgtatcatatgctctctgtaaaaaatctgctggagcatcaagttgatataacgagtacagtggctttgctgaatatgtatgggcttatttcttcgttagatatgtcagtaacagtcattgtgttttggactgtttttcactctctcagaaattggcgcagaatgcggtgggctgcgatggttctgttggttgcagtgtggttattcttcgatgaatacatcataagccctttggttgaatctcaaaagcatttctggcctgtaacagtctattgcaattttgatttccacttctacaatgtttggagattggaattaaaacctatccatctgtctgtgctagggtttcctattactttagtcatcacattcttgctgctcattatggcttcaaaactgcttgatcgtaaagtagaggtgtaaatatggacaatcaattccaatcctcgaaaccgatttatctgcagatcgctgatcagatcttttataggctggtcaggaaggagctgctcccaggagacaagcttccttcagtaagagaaatggcgattcaaactaaggtaaatcccaatacaattcaaagaacttacagtgagatggaaaggctgggtattgtggagacaagaagaggtcaagggacgtttattgcggaaaaagcagaaatcgtagacgagctgaaagacaagctgacacgagaggtgctggaaggctttgtcaagcaaatgaaagagctggggctaacgaaagaggaaatggtagaagggattaaaacattcacagagggaggctaaaatgggaatcaagctagaacatgtatcaaaaaaatacggccgccatacggccgtcaatgatgtgtcaatcaccctatcatccggacggatttatggcctgatcggaccgaacggcagcggcaagtcaacgaccctgaaaatgatggctggccttctgtttccgacttcaggatttgtgaaagttgatgaagagcaggttacgagagaaatggtgcgtcaaacggcttatcttactgagcttgatatgttttatccgcatttcactgttaaagatatggtgaatttttatcagtcgcagtttcctgattttcaaacagaacaggcttataagctattgaatgagatgcagctgaatccggaaaaaaagatcaaaaagctatcaaaaggaaatcggggccggctgaaaatcgttcttgctttagcgagacgggcagacgtcatcttgcttgatgaacctttttccgggcttgatccgatggtcagggattccatcgtaaacagccttgtgtcgtacattgattttgagcagcagattgtcgtgatcgcgacacatgaaattgatgaaattgagactttgttagacgaagtaatcatcctcgccaatggagaaaaagttgcgcagcgtgaagtagaagatattcgtgaacaggaaggcatgtctgttttgcaatggtttaaatcaaaaatggaagtttgctagaaagaggaggaatatgatgaaaacagtgttggaattgaaaaacgtgactaaaaacatcagaggccgaacgatcattgatgatctcagttttacgattcgtgaaggcgaggtattcggttttttgggaccaaacggagcggggaaaacgacaaccatccggatgatggtggggttaatgaagctgtcgaaaggtgatgtcctcatttgcggccaatcaattacgaaagaatatgccaaggcgattaagcatatcggagcgatcgttgagaatcccgagctgtataaatttttgagcggatataaaaatctccagcaatacgcaaggatggtcaagggtgtcacgaaggaaaaaattgatgaagttgttgaactggtcggtttaacagacagaatccacgacaaggtgaaaacatattctctggggatgagacagcgtcttggcttggcacaatgccttctgcacgatccaaaagtgctgattttggatgaaccgacaaacggccttgatccggcggggatcagagaaatcagagatcatttaaagaagctgacccgagaaagaggaatggctgtcatcgtttcaagccacctgctgtcagaaatggaactgatgtgtgatcgaattgcgattctgcaaaaaggaaagctgatcgatattcaaaatgtaaaagatgaaaacattgatgagaacgatacatatttcttccaggttgagcagccgaatgaagccgctgctgttttaaatcagtacgatttgctgagtaagacaaatggtgtagaaatcaaactggctaaagacgaagtccctgcggttattgaattgctggtgatgcagcaaatccgtatttatgaggtcaaggtcataacaaaatcattagaggaccgtttcttagaaatgacaggtgaaacaaaagaggaggttcagcatgcttaatttgatttataatgagtggctcaaaattttcagccgtgccggaacatgggtgatgatcggaattctggggctgacaatggttggatttgcatttttagcgaatcatttttctgctggtgaatcaaattcccattggaaacaagaacttcaagcacaaaacgccgaattaaagaaagaaatcaaagaagatccttcactgaaagatgggtataaagaaacaatcacactcaacgactatcgcatcgagcataatatccctagtgacacgggctatacggtatggtcttatgtaacggattcagcaaactttaccatccttaccggtctgtttactattatcatcgcggccggaattgtcgcgaacgaatttaattggggaacgattaagctattaatgattcggccgctcagccgttttcaaattttgatgtccaaatatattacagttctcctgtttgggctcctgttgctgttgattttatttatcggttctactttattagggttgatcttcttcgggacgggtggtgaaaccgccgcgaatattcatttaatctataaggatggccatgtcattgagcaaaacatgatggggcatttggccacaacgtatctttctgaatccgtctcagccttaatggtggcgacgatggcgtttatgctgtctgcagtattcagaaacagctcacttgcagtagggttttccatctttttattggttgccggtacgactgccactgcatttattgcagcgaagtttgactgggcaaagtatatattgtttgctaatgtcgacttgactcagtatgtggatggcacaccgttaataaaagggatgactatgacgttttctatcgtcatgctggcgatctactttatcatcttcttgttgcttgctttcggaatcttcatgaagcgggatattgcaaactaataaagaaagctgttttgcataagcaaaacagcttttttgtcaaaataaaaactgcaggtttgcacctgcagtttttcatatcaatttatgcttacgcttctttagtaacgttagcagcttgtggtccgcggtttccttcaacgatttcaaaagaaacagcttggccttcttctaaagttttgaagccttcgccttgaatagcagagaaatgaacgaatacatcgtcttgaccttctacttcgatgaatccgaaacctttttcagagttgaaccattttactttaccttctaacatgaaatttcctcctaaagcgatcataacgcttaaattcactattcttgctcttaacaaactttcaagacgaaaactcttacaaaactttcttcttaaagatagttcgaacaaaaataattacctttactctaccagtaatcttcagaaaaaacaactgcttattgaaacttttttcggaaaataccatatttatttttcaatttgatatttatttgcggaaattcatctgctttctcgatatgtgatcatacgtttgccttagtattccttcattttgggaagataagtaataggaattgacaaccttattggatatgagtaaggtaaaagttaatcaatattacaaatgacaacgtttatcaactaagagagcgtatgatttttatgtctgatattgcttgcatgctctaatacatagataggagtatggtcacaatgaaaaagtggcttatatgcagtttcgtccttgttcttctcgtttcatttactgcatgttcaccgtctgcagaacatgaatcgataaaaatcgggattgctgagtctgacggggcaatatggaactatattgctcaaaaggctgaagaggcagggctggatattcagctgatccctttttctgattatgcggagtctgatatcgcacttgctaacaaagaaattgatgccaacgcctttcaaaccatttcatattttcagtcgttcacccaaaaatacaaacttaatttgacgccgctcgggacgacatacataacgcccatgggcatttattcaaaacgatatgaccgaatccaagatataccgcgaggagctgtcgtttctgttccggataaagcgttcgattttggcagggcgcttacagtgctccaggaagcgggtttgctaacgctgaaaaacggatttaacggaacaggttcagttgatatgattaaagataatccgagacacctgaaattaaaagctgtccggcaacaggatgcagtgagcggtgccgacgtgtttgtcatgaaaccatcagaagcaaaaaaagcgggcctgaacccgaaaaagcatacgctaaagagcggcggactcatgtctgaggaagagatgaatttgattgttgtcagagcggaggatcaagatcgggaagcgctgcaaaccattcttgagctttatcaagcagatgatacagcggcatttatagaaaaagaatatcagagagatcttgtcccggcttttctgcctttgaaacgtctttcagattggaagaatgaattcgaacattgaattcattcttttttttctgaaaaacacactctgttccgtcccgtttctttcgctttgtaaagcatttgatcggcaagaatgggcaaggatcctggctgttccgtattattggggtaatgagcggcccctagtgatatcgtaactgaaagctcttcgccgtttgttaatacaatcggtgcatcacttacagtgctcctgatccgttcagcgatccgggctgctttatcaagagaacagttcggcaggagaacggcaaattcttcaccgccgatccgagcggcaggatcagtatttcggatgctctgcttcagacgtaaccccagctctttgagcacctgatctccttcatgatggccatattggtcattgatggtcttaaaatgatcgatatccatataaatcagtgcaaattgaaaatgcggggtatcggccgcctgctgatacagagcttttgtggtttcttcaaactttcttcggttatacacgcctgttaaaaagtcaaagtgcgcctgaaacttatattgtttaaaaagaagatgtgcatttgtttcatgatcaataatatataaactgagcatgccgcccgctattgatatgatccaaaaatacaaatgaagttcgtatgaatgtaaatctataagaaaataaaaggaaaaggagatcaagctatttgtgattattaaaagatagaaagcatgttttagttgaactttttttcttctagaaacaatgagtgacgggatggcagcgatacaaatgataataaccgagtatagtgcagatgtgttcattgtaatcagcaagcggcctgcagtgatcatggccagggccgttgccgttgaaacccagcctccataaagagcggcaatcataatagggatatttcgaagatcaataattgaatgctgataggtaaatccaaaaaccatcagaataaccccgagcaaaccgcaggccagtcctttaacagcttgaaaggatatgctgtcttttttatgtactagcctttctttaaacaggtgggtgaagagataattaaatgtgattaaaatggtcaaatttacaaacagttctttcagcaaatattatcacccttatataaggtactaaagatggaagggaaagaaaagaaaaaaaaaggcattatataaggtttttttacttgaattgataagttaaaataattctcacttgacccatcggaattagtgtaatatagtaaatgagaaaatttgaagggagagtttacctgctttggagactttactggttgtattacatgtatttattttatttttacttatcttagggctctttgttatgcagaaaaaacatgtttccttctctaaacgtgtatttactgcgctggggctgggaattgtattcggatttgcgcttcagctgatttacggcccgacttcaaatatagtcattcaaacagccgactggtttaatattgccgggggcggatatgtcaaattgcttcagatggttgtcatgccgctcgtctttatttcgattctcggcgcatttacaaagctgaagctgacaaaaaatcttgggaaaatcagcggtttgattatcgggattttagtagcaacaacagccgttgctgcagctgtcggtatcgcgtccgcgctttcatttgatctgcaggcgattcaggttgaccaaggaagtacagagctttcacgggggcaggagcttcagcagaaatcagaggatatgacagcgaaaacgctgccgcagcagattgttgaactgctgcctggaaacccgtttttagatttcacgggagctagaccgacttcaacaatcgctgtcgttatttttgccgctttccttggagtggcattcctcggcgtcaaacacaaacagccggaacaggcagaaacatttaaaaaactggttgatgccgtttatgccattgtcatgcgtgttgtcacactcattttgagactgacgccttatggggtgctggcaatcatgacaaaaacaattgccacgagtgatcttgacagcattttaaaactgggcatgttcgtgattgcttcatatgccgcgttaatcactatgtttatcattcatttgctgctgctgacgttcagcggcttgaatccgctgatttatttgaaaaaagcggtgcctgtacttgtatttgcatttacgtcaaggtctagcgcgggtgctttaccgctgaatattaaaacacagagaagcatgggtgtaccagaagggatcgcaaactttgccggttcgttcggtctttcgatcggccaaaatggatgtgccggcatttatcctgcgatgctggcgatgatgattgctccgactgtcggccaaaatccatttgacccggtgtttattatcactgttatcgcagtcgttgccatcagctccttcggggttgccggagtcggcggcggagcgacattcgcggcgcttcttgttttatcatcattaaacatgcctgtcgcgctcgccggtttgttaatctcaattgaaccgttaatcgacatggggcgtactgctttgaatgtcagcggaagcatgacatccggtcttattacaagtaaggtcacaaaagaaattgatcaaggggcatttcatgatcaatccagagtgattgaagctgaagaagcgtaacatatgaaaacgtgtaatccaagaggattacacgtttttttaacggccgggttctaaatcctccagcatttccatcatcgtgttgtcgtccatgacattcattgcgctttgttcaaaatgaatgggttcagcataatgcggctgtctttttttcgcggctgactcagtttgcctagtttgagactgtgtatgctgatgcagtggttgctgctgtccagcgtgctggtgctgacggccattttgccgctggctttgatgctgcgaacggtcctggttatcaccgctgcttccgctgcttccgctaaatgcttgtttgaccatgtttcctacattagaagcatcaaacgtgttattttctgaatttcgtctgttcatttgtcctgtgataaacccgctaattctttggcggatctgaggtgataatgcagcaataagcatagttgatcctatgatcaatgctgcggggctgattcctcttcgctggttgaacaacatgatccctcctttgcagtgtattcatattttccccctcgttagacaaattaaccgttatatttcccgggaaagcatttcctccagatttgcatgcataattaaagccagttagaaaaacctataagtaaagtgataaaggaggaattcacatgtttggaaaaaaacaagtccttgcgtctgtgcttcttatccctttgcttatgactggctgcggtgtggccgaccaaggtgagggcagacgtgataataatgatgtaagaaacgtaaattatcgaaatccggccaatgacgatatgcggaatgtaaacaatcgggataacgttgacaacaatgttaatgataatgtcaataacaatcgtgtaaatgacgataataacaacgaccgaaaacttgaggttgctgatgaagcagctgataaagtaacagacctaaaagaagtaaagcatgccgatatcattgtggctggaaatcaagcctacgttgcagtcgttttaaccaatggaaataaaggtgcagtagaaaacaatctgaagaaaaaaatagccaaaaaggtaagatctactgacaaaaacattgataatgtttacgtttcagctaatcctgattttgtagagcgtatgcaaggatatggaaaacgtattcaaaatggtgacccaatcgccggattatttgatgaatttacacaaactgtacagcgcgtattccctaacgctgaataaataaaaaaagccgcacaatttgtgcggctttttctttgcgttaatgacacactgcgaactcaggctgcatagagtaaaaataaaaaggtacaagacggaccggctcagggagggagacgtttgcgggatggcataggaaagcgtgcggcatccgctctattcctgtgcggagtccttgtgatgctggctgtaagctcagccatcgtatcaagcgcgatgtatatcctgtcttttccaggtcaggcatctggaataacaaaagaacaagtgacgaagcacatgaagaaagagtcattcaaacaggccgatatttattacacttctaaggaaaagtccttactgccattgacgaaagaaacgcttgaatatgcggtcagtattaatcagattatgattggatattcgaatcaaaagcctattgacattattttttttcctaatgaaaaacagatggaggcttactccggtttattggatgtagttggtttttattctgagcgggagcagttgattggactgttgcctgaagagaaaaagaaactgttagaaggggacgaggtagcggtttatttgtaccagagattgttgattcatgaatactcgcaccatgcgtttcatcagaaattgaaggagcttgagacggatcccgatgagtttccgttatggtttcatgaagggttaagcgagtggattgcgaactatgaattgctcatagatccgatcacgttttctgtcgtgccctttgaccgtttgcagactgatcgagactggcaggaagccagagccgaatatgacactgatgtctatttgcaaagcttttatatgatcgatgagctgaccggcaaatacgggaaagacattatttcagaaatgattaaggaaacagcaaaaaaaggggactttgaaaaagggtttaaatcagcaacaaaggaaagtcttgatcattttgaaaaggattttaagaagaaatttgaaaaaaacagtgcggcattggatagtatctatccaatgcctttgttattagtgaagtccttgctgacccattccgccttgtgtcggaggcatttgtccttgggcaggggcgaatgaatttctcagctgttccatatcctgcgcatcaagctgaggaacctggtaatagccgtgtttgttttggtatagaaaaatttcaaatgccatttcaacatactcctgaatttgcgcagacagtacgcgtcttacggccggatttgtcatttccagagacgccatcgtcagcatagaagcttgtgctttaatcgcgcaaagcatttgtcggctgatgatgctgtcatcaatatcattcatggattgaacaggttttttaggctgtgacggctgcatgccgtaaacagcctggttgtcctccttcatcatataagttgctgttttttgtgaaggttcgcttcctgttttgaagcattctgcagttatattgtattgagatgtaatgaattgatgttgacgatcaaggatgtttagtaattcttgatccttacagaattgtctcagcatcatatactgatcaagcacagtaagtgttccggaaagcacctcatgcatatcaaacatttcatgtccgccgtggtttttatgcggtttgccaggaatacctttgttcatttgggattgctgctgctgattgaactgatccaaaccgaattcctccttttttttcagatcaactgtattttgtgtcagtctgccgtgtattatgcagaagcctgaaaggaattatatgctgtctgtcgaaatgataagcagacaaaatcgttgtcattatgtgtatattaagggaggaaatatgatgaggcgtattctgcatattgtgttgatcacggcattgatgttcttaaatgtaatgtacacgttcgaagctgtaaaggcagctgaaccgcaacagcctatatcgattgagaaggcaatacagcaaaaagaaggacaggcgcttgtcgaaggatatgcagtcggccaggctgtttccccgcagcattataagctgacaagccctttctcaaatgattataatgtcgcgctggcagaccgtaaaaatgagacatcgcccgaacacatccttcctgtgcaaatcccctccgccttcagaagccaatttgggctgcaaaccaatccgcttcttcttgggaaaaagataacggttcaaggaaagcttgaaaattactttaacacgacaggacttaaaaacgttcagtcgatgaacgtaaccgatgacacgaaaactccgccggctgaacagccagtgaccataaatgaagcacggggaaggctgaatgaagaagtaacgataaaagggatcattacagctgatcaaaacgcaatcggaggcgggaagctgtcgacctttttgcaagatgaaaccggaggcattaacatttattcgccatcccctgaacaatttcccgaattaaaagagggtatggatgtcacggtgacagggaaaatcacgtcttaccaggggctgaaagaaatcgttccaagctcatcaggcatcaaaatcaaccagtcaaatcaatccctccccgccccaaacacttaacaatcaatgaacttattaacggcagcctaggtgatcagtatgaaggacgccttgtgaaactaactgcttttgtttccttaattccaagttctcctgccggcggcggttacaatgtaacaatgattgatgacgaccatcatgcaatgacgctccgggttatgaatgaaacaggggtgataaacgagcttgatgagggcaaatggtatgaatttaccggtgtgttaagcagataccaaacctttcaactgcttccgcgaaaatcggctgacctgaagctgcttgaagagcagcccgcacctccgtctgcggagggagaatatgaagggattgttgaccgggttgttgacggcgataccattcatctcaaatctccggtgcttggaacgacaaaaatccggtttgtaaatgtagatacacctgaaacatatcacacaccaaaaaatgacgcagatgaaaatcaattaagatttggcaaaaaagcatctgactatctaaaaacggttctgtccccaggtgataaaattactgtcaaggtcgggagtgaagccaaggacagctatggcagactgctcggacaagtcataaccgaatcaggatcaaacgtgaacttagagcttgtaaaaaacggctatgctccgacgtattttatttggccggttgacaatgaagaggattatcagcaatttcaggccgcagtagccgctgcaaaaaaagatcaaaaaggaatttggaatgaaaacgatcccctcatggaaatgccgtttgaattcagagccagagagcaagggaaaggcctgacaagatatgtggggactcgtcgaataaaacatatgtgcagccagctgactggaagaagatagctgtggaaaacagaattttcttcgcttcagcaagtgaagcggagagcgcgggatataaaaaaaggcaaacggcacctcaagaacatgtgccgcttagaattctcagcatgaatgatttgcatggcaaaatcgatcagcaatacgagcttgatcttgatggaaatggaattgcagacggcacgtttggacgcatggattatgccgccgcatatttaaaagaaaaaaaggctgaaaagaaaaactcgctgattgtgcacgcgggagatatgatcggcggaagttctccagtttcctctcttcttcaggatgaaccgactgtagaactgatggaggacatcggatttgatgtcggaaccgtgggaaaccacgaatttgatgaaggcacggatgaactgctgaggatcttaaacggcggtgatcatccgaaaggcacaagcggatataatggacagaactttccccttgtatgtgccaattgtaaaatgaaatcaactggagagccctttttgccggcttatgacatcataaatgtggagggcgtacccgttgcttttatcggggttgtcacacagtcggcagctggcatggttatgcctgaaggaataaaaaatatcgagtttacagatgaagcaacagcggtgaataaggcggccaaagagctgaggaaaaaaggcgtgaaggctatcgcggttctcgcacatatgtcagctgaacaaaacggcaacgccattaccggtgagtctgctgatcttgcaaacaaaacagattctgaaattgacgtgatttttgccgcgcataatcatcaggttgttaacggtgaagtgaatggaaaactgattgttcaagcgtttgaatatggaaaagcgataggtgtcgttgatgtagagatcgataaaacgacaaaagacattgtcaaaaagtccgcggaaatcgtatatgttgatcaaagtaaaatcgaaccggatgtcagcgcgtcagccattttaaagaaatacgaaacaattgcggaaccgattatcagcgaggtagtcggcgaagccgctgttgatatgggaggggggtattcaaatgacggcgatacacctcttggaaacctgattgcggatggtatgagagctgccatgaaaacggattttgctcttatgaatggcggcggcatacgtgaagcgctgaagaagggcccgattacgtggggagatctttacaatattcagccgtttggaaatgtgttaacgaagcttgagattaaaggaaaagatttaagagagattatcaatgctcaaatctcgccggtttttgggcctgactacagcatcagcgggtttacgtatacgtgggataaagaaaccggaaaagcagttgatatgaaaatggcagatggcaccgagatccagcccgatgccacatatacattgaccgtcaacaactttatggcgacggcgacaggagccaaatatcagccaatcggactgctgggaaaaaatccggtgacagggcctgaggatttggaagcgacagttgagtacgtgaagagttttgatgagccaattgcgtatacaaaagagggaagaattaagctcgctgaagccagtgatattgaagaccctgtaacagaagacccgattacggaagagcctggagatgatccggggacggagcatccaatgaaagaggttccagagcctgatgtggatttgcctgatataaaagaaactccgggaacagcaccggttcatcagcttccgccttcagccatttcgagattcaatgaaataccaatcaacaacacaaaaaccgctgatactgctaatagcatcagcacattgccgttacaaaccgagactgcggaaagcgggtctgatcatcagcttccggatacgtcagcgggctactataactttatggtaatcggtgcggcggtgacattgtcaggaacttatctatatgtcagaagaaaaaggagcgcctccagaacgtgaaaaaagttattccactattcatcattgctgccggcctagtgatcgcaggctatggaggctttaaattaatcgatacgaatatgaaaacggaacagacattaaaagaagcaaaactggcggctgaaaagccacaggaacttttggggacgaaaaatagcacagatcaagcaaagaacaaagcatcatttaagcctgagaccggccaagcgagcggcattttggaaataccgaaaatcaatgcagagcttccgatcgtggagggcaccgatgctgatgatttagaaaaaggtgtcgggcattacaaggacagctattatcctgatgaaaacggacaaattgtgctgtcggggcatcgggataccgtgtttcgccggacgggagagctggaaaagggggatcggctccgcattctcctgtcatatggagaattcacatatgaaattgtaaatacaaaaattgtcgataaggatgacacatctattatcacgctccagcatgaaaaggaagagctgattctgacgacctgctatccgttttcatacgtcggaaatgccccgaaacgctatattatatatggaaaacgagtgacttaaaaagccgaggcagtgcctgcggcttttcttcatgaaaaatatgtgcggcaaaggtttttcatatcagcagggaaaggggcttcagcaactatgagctcgtctgttatcgggtgaaccgcttgtactttattggcgtgcagtgcctgcctgtttagcagcttgctcccgcctccgtaaagcgagtctcctgtcaacggatggccgaggctcgccagatgaacacggatttggtgtgttctgcctgtttccagctctaattcaacgagcgacagccgttctttcgcattgctggccattaccttgaaatgagtgacggcagtttgcccgcctggtgaaacccggcgtcttgtcgggtgtgaccggtctctgccgattggtgaattaattgtcccttttttcgtccgtagcttaccttcagcgatggcggtatacgtacgcttcagcgtctttttctctaactgctggtctaagatggcgtgtgccaaacgatgcttggcaaaaacgatagcgccagatgtatcctgatcaagacgatggacgtggcgcaccttacatgtttcgccatttatctgataatgataagcgatcaaattagccagtgtgccggtttgcccatcctcattcggatgcgtcgcgatgccagcgggtttattgacgatgagcatatgattgtcctcatataaaatatcaagctcgccatactccggaatgaccgaagatgcttcactttcctgaagatcaatgaacacacggtctcccttttttacaatcatattgtttaagacggattcgtgattgacctttatctgttgatgggacatccagtcttgtatcactggtttagaagctttgagcgctgttttgagtacggaaaacagccattggccgtcctgtttttcattgatgaggatctcaagccctctgcctttttggttcatgttaaatggctccttttcgaagcggaaggctgctgtttctcataggaaacacttaccttagctttcgcgtttttttctgtgctattcttgagtaagacttaggatattcgatggcaagaaaggtgattgacgtgagaattgtgaacgcagcaactgcagaacaggagagctttatcaaggagctgtctatggagctgatccatgatgtatttcctctttatttctccgaactggacattcagcgctttaaaaagaaaggcgttctgtctttaaataaccattattaccaaggaacattaaaagaagcatttcaaattatggcttgtcttcaaatgatacatattatcctgaccaagccttcgccgcactctgatttgagtgatcaggcgatttttgaaaaaaacagcaagatgctgaatgattttgggatttattttccgtttgctttttctgactttcaaaagaagactaacaaagcctttttcggtcaaagaaggctgatataatcatgcggcaagggcttttctatttttagaaaagctcttttttgtatcagagaaatcatatcataaaacctttcctctaactccctttttaaacggctcgtgtctgaacatactaatgattgaaaggggtgctgacaatgagttcagttaaagatacaatgacaacgcaggtggcaaccgtttctccgaatcaaacgattcaggaagcggcttctctaatgaaacagcataacgtcggggcgatccccgttgtagagcaaggtgttttaaaaggaatgctgactgaccgtgacattgcattaagaactacagctcagggccgtgatggccagacacccgtttcagaagtgatgtcaacagaactcgtatcaggaaaccctaatatgagtctggaagacgcgtcgcagctgatggcccagcaccaaatccgccgccttcctattgtagatcaaaacaatctagtcgggatcgttgcgcttggagacctggcagtcaatcagatgtcgaacgagtctgcgggatcagcgctgacaaacatttctcaccaaaacattcattaataagaaagagcttgcagtgtgcaggctctttcttcacataaaaccttactttttgaaagcagacttgtttcggggtatagtgagtgtatacatatgtctcaattcgtactaaaggagttgtacccagtgattaaagcgttaatttttgattttgacgggcttattctagatacagaaacacacgaatatgaagttcttcaggaaatatttgaagagcacggctcagtgctgccgctatctgtctgggggaaggtcatcggaactgcagcgggtttccggccttttgactatttagaagagcagatcgggaaaaagctgaaccatgaagagctcacacaattgagaagagagcggtttgccaaacgcatggaatcagaaaaagcgagacctggtgtcgaagcgtatttgaatgcggcaaaggatttaggcttaaaaataggccttgcctccagctctgattataaatgggtgtccggccatttgaagcaaatcggcctgtttgatgattttgaagttattcaaacggctgatgatgtggaagaggtgaagccgaatcctgaactctatttattggcggcaaagaacctgggggtatcgccagcggaatgtctcgcgtttgaggattctgtcaatggttcgattgctgcgaaacgtgcaggcatgaagtgtgtcattgtcccgaataaagtaacgggcaccttgatgtttgaagactatgatcacaggcttgaatcaatggcggagatggagctcgccctattgcttgatcatctgaactcacaaaactagaaaggagcgagtaggttgtctgagaaattagatttgacccggtttgaaaagaaaatggttatccgcaatatcgaagagaaagacatcgacaagattatcgatcttcaaaaggactgctttccaggaatggagccttggaagcgggagcatttaatcagccatttggagcattttccagaagggcagttttgtgcagaattcgaaggtgaaattatcggttcgtgctcaagtctcctgattaactttgatgaatatgatgaccgtcatacatggcaggacattacagatgacggttatatcaccaaccataatcctgacggcttgaatatgtatggaattgaagtcatggtggacccgaagtacagacgaatgaagattggccaccgtttgtacgaggcgagaaaggacttagccagacgcttaaacctgaaaagcatcatcataggcggacggattccaaactatcacaaatatgcagaggaaatgacagcgagagagtatgttgaacaggtgacacgccaccaaatttacgatccggttctttcttttcagctgatgaacggctttacccttatgcgaattaacccgaactatctcccggatgatacagcttcgatcaagtatgcgacgctgatggaatggaataatgtggattatctaccgcagcagacaaaacgctattataaatcggcgttccctgttagaatttgtgtgattcaatacgaaatgaagaaaatttattcctttgaggaatttgcgaatcaagtagaatactatgtcgatgttgcttccgacgcaagatctgattttgcggtgttcccggaaattttcacaacccagctgatgtccttccttgaggaacggtcaccgagcttggcggtgcagagaattactgagtatacagaagattacatcagcctgtttactgacttggctgtgaagtataacgtcaacattatcggcggatctcatttcgtcgaagaggaaggcaagatctataatatcgcttacctgttcagacgggacggaacgatcgagaagcaatacaaactccatattacgccgaatgaacgcaaatggtgggggatcagcgcaggagaccaagttcgcgtgtttgatacggactgcgggaaaatcgcgatccagatctgttatgacattgaatttcctgagcttgcccggattgcggctgataaaggagccaaaatcatctttacgccattttgtacagaagaccgtcaaggctatctacgtgtcagatactgttcgcaggctagagcggttgaaaatcaaatttatacggttatctctggaacggtcggaaaccttccgcaaacggaaaacatggatatccaatacgcccagtcaggcatctttgccccgtctgattttgaattcgctcgtgacggcattgtcggcgaaacaaacccgaatattgaaatggtcgtcatcggcgatgttgacctggaaattctcagaagacagcgccaaaacggtacagtgcgccagctaaaagacagacggcgtgatatttatcatattcaatataaaaaataattcccaaaaaacccgcctgaattggcgggttttttaaaacaaaagcggaattgtttaggtgctatctttaaaataaaagtaggtataatggagtttctgtattttcgccatttcctatatcatacagaaatcggctaggcttccattgctattgcaatggctgtccaagttgtttcgagtgcgacctttatcagtacgatgctgagcattgccactttgcctgttttgctttggaagctgcatcctctttcttcttgagaaagaggatattttattatttacgcggtttattgactctgacccggtctggctttatattgaaggcagggaaatcatcaccaagacatcacataaagagaaggtctgtttcaattgaattggcattatagagaacgctaatgaaatggagatgatggggatggaaaacattcagcaaaataagggattaaagcaaaaagatgagcaatttgtgtggcatgccatgaagggagtgcatcaagcggacagcctgatagcccagaaggccgagggggcctgggtaaccgacacagacggacgccgctatttggatgcgatgtccggtttgtggtgcgtcaacattggttacggcagaaaggagcttgcggaggctgcctatgagcaactaaaggagctgccttactacccgttaacgcaaagtcacgcacccgcaattcaactggcggaaaagctgaatgaatggcttggcggcgattatgttatttttttttccaacagcggatcggaagcaaacgaaactgcttttaaaattgcccgccagtaccatctgcaaaacggcgaccacagccgttataaattcatctcaagatatcgggcataccacggcaatacattgggagcgctctcagctaccggacaggcgcagcggaaatataaatacgagcctttgagccaagggttcctgcatgcagctccgccagatatataccggaatcctgatgatgcagacacgcttgaaagcgcaaatgaaatcgaccgcatcatgacatgggaattaagcgaaacgattgccggggtcattatggagcccatcattacaggcggaggcatcctaatgccgccggacggatatatgaagaaggtggaggacatttgccggcgccacggagcccttttgatttgcgatgaagtgatctgcgggtttggacggacaggtgagccgttcgggtttatgcactacggtgtgaagcctgatatcattacgatggcaaagggaatcacaagcgcgtatctgccattgtcagcgactgctgtgaaacgggacattttcgaagcgtatcagggggaagctccttatgaccgtttccgccacgtgaacacgttcggcggaagcccggctgcctgtgctttggcgttgaaaaacctgcaaattatggaggacgaacagctgattcagcgatcccgtgatcttggagcaaagcttttaggtgagcttcaagctctgagagaacacccggcagtcggggatgttagaggaaaagggctgctgatcggaatcgaactcgtcaaagacaaattgactaaagagccggctgatgccgccaaagtaaaccaagtggttgcggcgtgcaaagaaaaagggctgatcatcggcaaaaacggcgatacagtcgccggctacaacaatgtcatccagcttgcgccgccattttgcctgacagaagaggacctttcctttatcgtgaaaacggtgaaagaaagctttcaaacgatataatataaaagtgaattattaaaggagcacatgatgagttttcacaaccagccgatcttaccggctattcgcaatatgaagcaatttgatgagtttttgaacagttcattctcttacggtgttattcttgatattcatctcggccagctgaagggcgtgatcaaagaagcgcaaaagcacggaaagaacatgatggtgcacgtcgatctcattcaagggattaagcatgacgaatacggtgcggaatttatatgtcaggatatcaagcccgctgggattatttccacaagatcgaatgtgattgccaaagcgaagcagaagaaaatttatgccattcagcgcctgtttttgcttgatacaagcgcgatggagaaaagcatggagtttatcggcaagcataagcctgacttcatcgaagtgcttcccggcatcgttccgtcactcattcaggaaataaaagagaaaacagggattcccatctttgccgggggtttcatccgtacggaagaggatgtagagcaggcattgaaagcgggggctgtagctgtcacaacatctaataccaaattgtggaaaaaatatgaaaactttttgacggaaagtgattgacaccgctttcatgcactgatacaattgcactaggttaatacattgtgatggagaactcggagaccacagcagctctttacggcaaatgtttatgcacccgtaaagcggtttgttgtggtttttttattctcttcttctctatcatgctttttaatcgtgactttaggaggaatgtgctatgacagcattttggggagaagtcatcggtacgatgctgcttatcatttttggtgcaggtgtttgtgcaggtgtcaatttaaagaaatcgctttcattccagtctggctggattgttgttgtatttggatggggattgggtgttgccatggcggcatacgcggttggcggcatcagcggtgcccatttgaatccggcgctaacgatagcgcttgcatttgtaggagattttccttggaaagaggttccggtttatattgcggcgcaaatgatcggagcgatcatcggtgcggtgattatttatctgcattacctcccgcactggaagtcaacggatgatcccgctgccaagctgggtgttttctcaacagggcccagcattccgcatacatttgcaaacgttttaagcgaagtgattgggacatttgtccttgtacttggaatcttggccattggggcaaatcaatttacagaaggacttaatcctttaatcgtcggtttcctcattgtagcaatcggtatttctctgggaggaaccaccggctatgctatcaatcctgcacgtgacttaggtccgcggatagcccacgcttttcttccgattccggggaagggctcatcaaactggaaatacgcatgggttccggtagtcggcccgattttaggcggatcattcggcggcgtattttacaacgctgcatttaaagggcacatcacaagcagcttctggattgtaagcgttatattggttgtggtattgttaggactctatgtttatacgaaatcacattctgctaaaacattatcaaattcaaaatatatttaatcaaaggggagacatcttatggaaacgtacattttatccttagatcaggggacgacaagttcaagagcgattctgtttaataaagaaggcaaaatcgttcactctgctcaaaaggaatttacacaatacttcccgcatcctggctgggttgagcataatgccaatgaaatttggggctctgtcctcgcggttatcgcctcagtcatctctgaatcaggaatcagcgcttctcaaattgccggcatcggcatcacgaaccagcgcgagacgacggttgtgtgggataaagatacaggaagtcctgtctataatgcaatcgtttggcagtccagacagacgtccggcatttgtgaggaacttcgtgaaaaaggatataatgataaattcagagaaaaaactgggcttttaatcgatccatacttctccggcacgaaggtgaagtggattttagacaatgtggaaggcgcaagagaaaaagcggaaaaaggcgagctgctgtttggaacgattgatacgtggctcatttggaaaatgtcaggcggaaaagcgcatgtgaccgattactccaatgcctcaagaacactgatgtttaatatttacgatttaaaatgggacgatgaactgctcgacattctaggcgtaccgaaatccatgctccctgaagtgaagccgtcctctcatgtgtatgcggagactgttgattatcacttcttcggaaaaaatatcccgattgctggagcggcaggcgaccagcagtccgcattgttcggccaggcatgctttgaagaaggcatggggaaaaacacatacggcacaggatgtttcatgctgatgaataccggggaaaaagcaattaagtccgaacatgggcttttgacaacaatcgcttggggcattgacggaaaagtgaactatgcgttagaaggaagcatttttgtcgcaggctctgccatccagtggcttagagacggattgagaatgttccaggactcttcgcttagcgaatcttatgcagagaaagtggattcaactgacggcgtatatgtcgttccggcctttgtcggactgggaacgccttactgggacagcgatgtgcgcggttcggttttcggcctgacaagagggacaacaaaagagcactttatccgtgcgacactggagtcattggcttatcagaccaaagatgtgcttgacgcaatggaagcagattcaaacatttcattaaagacgcttcgtgtagacggaggagctgtgaaaaacaatttcctaatgcagttccaaggagacctgttgaatgttcctgtggagcgcccggaaattaatgaaacgactgcacttggcgcggcttatttggcgggtatcgctgtgggattctggaaggaccgttctgaaatcgcgaaccagtggaatctggataaacggtttgagcctgaattagaagaagaaaaacgaaatgagctgtataaaggctggcaaaaagccgtgaaagcagctatggcttttaaataaagtaatactatggtataatggttacaagttaataagaacggtcctgagatgaggagagaccacagcaccaaagtgtaagcatgcactttggctgttgtggtctctttttctatttaccgtgacaacaaggaggagacgtaatgatgaaacatcaattttcaagtcttgaaagagatcgcatgctgacagacatgacgaaaaaaacatatgacctatttattatcggaggaggaattacaggagccggaacagctcttgacgcggcatcaaggggaatgaaggtcgcactaagcgaaatgcaggactttgcggcgggaacatcaagccgatcaacgaagctggtacatggcggcttgcgctatttaaaacaatttgaagtgaaaatggtcgctgaggtaggaaaagagcgggcgattgtgtatgaaaacggcccgcatgtcactacaccggaatggatgctgcttccgtttcataaaggcggcacattcggttcatttacaacatcaatcgggttaagggtttatgacttccttgcaggtgtgaaaaagtcagaacgaagaagcatgctttcagcaaaagaaacgctgcaaaaagaacctttggtaaaaaaagacggcttaaaaggcggcgggtactatgtggaataccgcactgacgatgcgagactgaccatcgaagtcatgaaggaagcggtgaaattcggggcagagcctgtgaattactccaaagtgaaggagcttctttacgaaaaaggcaaagccgtcggcgtattaattgaagatgtgctgacaaagaaagaatataaagtgtatgcgaaaaaaattgtcaatgctacaggcccttgggtcgatcagctcagagaaaaagaccattcgaaaaacggaaagcacttgcagcatacaaaaggcattcaccttgtatttgaccagtctgtctttccgctgaaacaggctgtatatttcgatacacctgatggccggatggtatttgcgattcctcgtgaaggcaaaacatacgtgggaacaacagacactgtttacaaagaggcgctggagcatccgcggatgacaacggaggatcgtgattatgtcatcaaatcaatcaattacatgttcccggaactgaatatcactgcgaatgacatcgaatccagctgggcggggctgcgtccgctgattcatgaagaaggcaaagatccttctgaaatttcacggaaagacgagatttggacatctgactcaggcctgatcaccattgccggcggaaaactgactggatacagaaaaatggcggagcacatcgttgatcttgtccgtgatcgcttaaaagaagagggcgaaaaggattttggaccatgtaaaacgaaaaacatgccaatctctggcgggcacgtcggcggttcgaaaaatcttatgtccttcgttaccgcgaaaacaaaagaaggaattgcagccggtttatcagaaaaagacgcaaaacagctggcgatcagatacggctctaacgtagatcgcgtctttgaccgggtagaagcgctgaaagatgaggccgcgaaacgcaacattccggttcatattcttgctgaggcagaatacagtatagaagaagagatgactgcaactcctgctgacttctttgtccgcagaacgggacgtttattttttgatatcaattgggtaagaacatataaagatgccgttattgattttatgagcgagcgattccaatgggatgagcaggcgaaaaacaaacatacagaaaacctcaacaagcttttacacgatgcggtcgtaccgcttgagcaataaatcataacgggctgtctgcagcccgttatttctttttacgtggaaagggccagatctcaggttatcaagtgacagaggcacccgcttcatataaaataatggcataagctgatacataggaggacgaatatgacttggagaaagagctatgaacgctggaaacagacagaacatttagatccggaattaaaagagcgccttattgaattagagggagatgaacaggcccttgaggactgtttctataaagaccttgaattcggtaccggcggaatgcgcggggaaatcggcgccgggacaaatcggatgaatatttacactgtgcgcaaagcatcggccgggtttgcggcatacatctcgaagcaaggtgaggaagcgaaaaaacggggcgttgtcattgcttatgattcccgccataaatctccggagttcgcgatggaagcggcaaaaacacttgcgacacaaggcatccaaacatacgtgtttgatgagcttcgcccgacgccagagctgtcattcgctgtcagacagctgaacgcttatgggggaattgtagtaacggcaagccataacccgcctgaatataacggctacaaagtatacggggatgatggcggccagctgcctccaaaggaagcggacatcgtcattgagcaggtaaacgcgattgaaaatgagctgacgatcacagtggacgaagaaaataagttaaaagaaaaaggcttaatcaaaatcatcggtgaagatattgataaagtttatacagaaaaactgacgtccatttctgtacatcctgaattatcggaagaagtagatgtaaaggttgttttcacaccgctgcatggaactgcaaataaaccggtcagacgcggacttgaagcactcggctacaaaaatgtaacggttgtcaaagaacaggaactgccggattcaaacttctccactgttacatcgccaaacccggaagagcatgcggcattcgaatatgccattaagcttggggaggagcagaatgcagatattctcatcgcgacagatcctgatgctgaccgcctcggcatcgcggtgaaaaacgatcaaggcaaatatacagtgctgacaggaaaccaaaccggagcgctgctgcttcattacctgctttctgaaaagaaaaaacaaggcatcctgcctgataacggtgttgttctcaaaacgatcgtcacaagcgaaatcggccgtgctgtagcttcttcattcggccttgatacgattgatacgctgacaggctttaagtttatcggtgaaaagattaaggaatacgaggcatcaggccagtataccttccaattcggttatgaagagagctacggttatttaatcggggattttgcccgcgataaggacgccattcaggctgcgcttttggcagttgaagtttgcgcgttctataaaaaacagggaatgtctttgtatgaggcgctcatcaatctctttaacgagtatggtttttatcgtgaagggctgaaatccctgacgctgaaaggcaaacaaggagcagagcaaattgaagcgattcttgcttccttcagacaaaatccgccgcagaaaatggcggacaaacaggttgtcacagcagaagattacgcagtaagcaaacggacgcttctgactgaaagcaaagaagaagccatcgacttgccaaaatcaaatgtattgaaatacttcctggaagacgggtcttggttctgtcttcgtccttcaggaactgagccgaaggtgaaattttatttcgccgtaaaagggtcatctttggaagacagtgaacagcgtcttgcctccctttctgaagatgtaatgaagacggtggatgaaattgttgagtcaacagcaaaataattcaagtatgagctgggtcattgtaaatgatccggctttttctttttctcatccaaaagtctgaaagaaaatcatcctacaagtgaagcaatgaaatacaaaaaactggtataatcttaaatacaagatcaatgccggagtgagaaacgtgagcaaaacgaggatggaaaaattaaaaacgctgaaaacgattgcggaaaccttaaatcaagggcacgatatcaaagcaacactggatgaggttttaaaagagttgctgagtctgacaaatcttcaatccggatggatttttctgatcgaagaagatggatcttatacgttagcggccgacgctaatctgcccccggctttaagccgcaaggaaaaagtgctgatgtgcgaaggggagtgttactgcctgacgaaattcaataacggagggcttagaaaggctgcaaatatcatgaactgcaaacgcatcgaatcagcagaaaacctgcattgttttgacacagaagggattacgcatcatgcaactgtgcctttagaagacggggacagaagattcggattgttaaatgtagcggcggccggaaaaaccatgtttgatgaggaagagctgcatttactcgagtctgtcgcctttcagatcggaacggcaatccagcgtatgaggctttctgaatatcaacaaaaaaatgctcttttaatggagcgtaaccgcctcgctcaggagcttcacgattcagtcaatcaaatgctgttttccgtcagtttaactgccaaagctgcgaagacactaacaaaagatgagaatttacagcagatgattgaattcatccaaaacctatcacaggacgcgctcgcagaaatgaaagcgttaatttggcagcttcgccccggaggattggaaaaagggctggctgaagccattaaaagctatggtgcactcattggattgaagatcatttttacacaaaaaggctgtcctgttctgactgatgagcatgagcatatgctatggcgtgtcgtacaggaagctttaaataactgcaaaaagcatgccggaacggatacggcgtatgttagtctgactgcttctttgtgccatgcggagctggatatcatcgatcatggggcaggatttcgctatgaagcgcataccggtctgccttcacttggcatcaagggtatgaaagaacgagcggaaaaagccggagctaagttttggattgagtcagcgcttggaactggaacaaagctgtccatcaggcttccgctaacaagccgaaaaggaggggcggtatgaaaattgtcattgctgatgatcatcatgttgtcagaaagggtctgcgttttttctttgccacccaggatgatattgaagttgtcggagaagctgcaactggaatagaagctctccgtgtcatcgaagagacaaagccggatcttgtgctaatggatctgtctatgcccgagatggacggcattcaagccattaaaaaagcaatacagcaatttccggagacgaatatcattgtgctgacgagctactctgatcaggagcacgtcatccccgcgcttcaggcaggcgcgaaggcgtatcaattaaaggatacggagcccgaggaattggtgaaaacactaagacaagtgcatgctggcgaatacaagctttctacagctattatgtcccatgtgctgacacatatgaaaaatcagcacgacccggaaaaagaaaaatactatcaattaacaagaagggaaaaagacgttctgactgaaatagcgaacgggaaaagcaataaagaaatcgcagcatccttgtttatttcagaaaaaacagtaaaaacccatgtatcgaatcttttagcaaaacttgaagtggccgatcgcacgcaagcagcgcttttcgcagtgaaatataacctgaatggagagatcttaaaatgaacatgttagtcataaatggcacgcctagaaaacatggcagaacaagaattgcagcttcctatattgcagctctgtatcacacggatttgattgatctaagcgagtttgtattgccggtttttaacggtgaagcggatcaatctgaactgttgaaggtacaggagcttaagcaacgcgttacgaaagcggatgcgattgtattattatcgcctgaatatcacagcggcatgagcggcgctttaaaaaatgccttggattttctaagcagcgaacaattcaaatataagcccgttgcattattggcagtagcgggaggcggaaaaggcggcatcaatgcgctgaacaatatgagaactgtgatgcggggtgtctacgccaatgtcattccgaagcagctggtgcttgatccggtgcatattgatgttgaaaatgctacagtggctgaaaacattaaggaaagcataaaagagcttgtcgaagaactcagcatgttcgcaaaagcaggaaatcccggcgtttaaacgccgggatttgtttatgtgagaagggctatttgatcttcataagtcagctctgtggcatgatcaatataacggagaagggaatacagcatcttttctaaaacggcgtaatcctgttcaaaatgatatgcatgcagaaaatgctcaattcgttttgataacaaatcgtcctctgtacgcaccattaaaattaataaattatcccattgagaacgatgggtgtaataaagcgctttatcgtaatcggcataatccatgaatcgcttctcctttcttgggtgagaagttcatgattagtttatgccgcatcctctgttattgacggggcaaaacttgccgtctgcgtaagtaaaggggtagcaatatgagggagacataaaatcaaaatgcctgaatgaagatatcgcttttggtaaacctatgagggaacatattctgggtacaggagactgaaaaaatgaaatccctgccgtataccatcgcgcttcttttttgcggattgattatcgtgtcaatggctgcaaaaggtcattcaacggacacagacgagtccgttcaaaagtgggaacagcttgcctggagcaaaattcaggatgaatataagggcgcttcattttctgattatgcttatatggggcgtacagaggtgaatgatcagcagacgaaagatgtctttcgggtgacagtcagacagaaagatgacactttttctgttcgggccgaagtctattttcatccggtgacaaatcatatgatcagcatcaacgtctttaggctctaataaaaaactgtacagccgttaaggccgcacagtttctgtttttagaaatatcgttttgcaccgagatagcgctgtttccagtaagagttgttcatattggaaatgacaactccggaatcgttggcatttatgaattccccgttgcctaggtaaattccgacgtgggaagggccggctttatatgttgtaaagaaaacaaaatctccgacagcaggctggctaactgatttcattgtgttccaatatcccgctgccgttaatctagatacggatgtgactttattcagtacatagtaaatgaatccgctgcagtcaaacccggacggtgtcgtgcctccccagcgatacggaaccccaagctgcgctttagcggccgaaatcattgtgttaatcttcgcactcgttgagctggtgttgtttgaagaaccggatgaagacgatgatgaagcttttccggaaatgaccagcttttggccaacctgcaagacatccgtttttaaattgtttttctcacgaatctgctgagctgttactttaaatttttgagcaatcacccacaaggaatcaccgcttttcactgtgtatgtagtcgtcgtgcctgagcttgcatttgacgaagaagacgacgatgatgaagagcctgaagatgctttacctgtcagcttcaatacttgtccaacgtacagcacatctgatttcagattgttgatatttcggatttgctgtacagacaggttatagttgtttgcgattttccaaagtgaatcaccgcttttaacggtatatttagttgttgctgaagtttggttcgatttggatgaagtgtctttagaagacgtatcagagccgcttgattttgttttcaacacctgattcacgtaaatggtgtctgattttaagttgttcaagaccttcaattcagcgatggacatattgactttgtttgcaattttccagagtgaatctccaagctgcaccttatatgttcccgtagaagatgaggaacttgaactcttattagaactgctttttgaactggagcttgaactcttattggaactgctttttgtactggaacttgaagaaacagtaccggacacctttaatttctgcccagcacgaattaaatcgctgcttagtccgtttaattttttcagttcctgcaccgtcattttaaactcatttgcgatcagccaaagtgaatctccgcttttcactgtgtaaacagaacttccgctcttcttggttgttgagcttgaagtagatgaagaagtgctggatttgctgcctggaatagtaagcgtctggccgatcgacagaacagtagtcgaaagatgattggcggatgtgagggccgccacacttgtgttataggtttgggccagtttccataaagaatctccgcttttgaccttaatcgttgctgcttcagctggtgtcactactaaagttgtgccgacaatcgcagatgctgtcagccctgctgctaatttctttttcatcttagctctcctttttcccccaatgattttgcatttgctgtttcttttttatatcggcacatttgtctcatcgttttgcctttttataaaaatagccaaattatcttaacaataagggggaaaaagggcataaaaaagaaggaatcttgatctattccttcatttttaaaagcttcatgatatcttctttgtttttgacgaggtcgcgcagtgtgtatttgtctaaaactgcgaggtaggccaaaagcgcttcattcagcacatgttttaagccgcaaaccggggaaataacacagagattcttattcgcatcaaaacattcaacaatattaaaatcgtcctccgtttttctgacaacctcaccgatgttgatgtcttcaggttccatgcctaatcgtatgccgccgccccgtccgcgtatcgtttctacgtagccgagctggccgagcctgtatatgactttcatgagatgattttttgaaatagaatacgtttcggcaatctgttttatatttgaaagttctccgggacgctctgcagccagaaaaatcaacactcttaatgaataatctgtataattggttaacttcataataagacctcagaataagacattttctatatcttatcataatcgattgaaaaatgaaaaaaaaggaattaaaaaaacatgcacccagctgggtgcatgttttttgcttacatgtcattcggcggattttggttttttcggtttttttcgatttctgtgttttgcattttgcgttcaaatgtagacagataacgtgatgcaaaatccttaccgccaaggccgaaggataaaccgaaagcgagtgcgaagccgctaagaacgatgatgaacgcggaattgacgattgtcgcagcgacaccaagctgatccagggccataaagaaagcaagtgcgataatcgtatatttagcaataggcgctaaagacttgaattcctggccttttatcatgcttgcgagcacttttctcaccaattctcctgcgtaaaggccgagtccgagaatgaatactgcgacaaggacattcggcagatacgcgatgatgccagtggcaatttctacgaggaagtgcagccgaacaatttgaagagcctcagctgtaaagagcagaatgacaatgatttgcgcaatcataccgacaacttgagacaaggacagctttgcaggcgttccggcttccatgcccattttccctaagacagaatcaaagcctgcgcgatggagcagtccggacaccatggatttcacccattttcctgcccagatacctgctaaaacaagcacgatggcaatcatgatgttcggaagcatgtttaaaatcgtattcagcatagagacagccggttttgaaatgccggagacatccagctgatcaagcgctgaaatgaccaccggaatcataatcagcacataagcgattgttccgatgactgctgaaaggcttgtatcttttaagtaaattgataaacccatacgtgccgcgaatctttccgtgccgatgcttgcaaggaaattcgtaatgatatcacgaacaaggcgggcaacaagccagccgattaatacgataagcgccgctgcaaataatttcggcagaaaagcgagcacgctttccatcatatttgtaaaaggacctgaaatgccgctgattttcaaagaagataagacccctggcagaaaaacaagcagcacgagataaaagacaatttgtgaagcggtattgacagcctggtgaatatcttttccttcagacaccaaattccacttgcgcagtttgtcactcgtgttcagcttcatcccgatttttttgacaaggaagctcaaaacagaggctgcagcccatcctaacagcagaatgagtccggctttcagcacgcttgggatcgcggctgcaatcgccgaaagcatactgacaaacggcgatgccactgttgtcaggtgcaaaatgttaaagaataaaataaagacgatgatcagtgcgataaaataaacgaccttgcttatgactttttccgaggaatagcgtgaaggctttttcccagcaaagagcttgtcgtcaatttttgttttgctgagtcctttgtataccgctttttcaatgattttagcaatagcccatccgattaataagacgagtaaagcaatgattacgtttggcagcttactgagataagaagaaagcacgtctgctacattcaattggtatcgctcctttttcgtagtatggtgtgtgtttacccactgatccaataagaaaacagatgaatgtgccgggggaattttttcttgcccgagtgagactatcatcttttgtctggcgggctcatacattatagataagtccaagtaggggggattcggttgaacgcggaggagaagaagggattacagcgggcaattgaggaaattaccgaaattgcaaaaggattcggccttgatttctacccgatgagatatgaaatctgcccggctgaaattatttatacatttggcgcgtacgggatgccgacaagattcagccactggagcttcggcaagcagtttcacaagatgaagctgcactatgatctagggttaagtaagatctatgagctggtcattaactcagatccatgctatgcttttttgctggacagcaactcactgatccaaaataaattgattgtcgcacacgttcttgcccattgcgatttcttcaaaaacaactgccgtttccaaaacacgaagcgcgatatggtggaaagcatggcggcaacagctgaacggataaaacactatgaacaggttcacgggataaaagaagtcgaatcttttttagatgcgatcctttcgattcaggagcatatcgatccgtcgttggtccgaccaaagctccaatggagtgtggatgatgaggaagaggagattgaagaggcagccacgccttacgatgatctatggtctttggatgaaaagaaaccgaaaaaacaagtgaaaaaatcgaaaaaaccgttcccgccgcggcctgaaaaagatatcctgctttttatcgaggagcattcccgggagctggagccatggcagcgtgatatattaacgatgatgagagaggaaatgctttatttctggcctcagctggaaaccaagattatgaatgagggctgggcttcctattggcaccagcgaattatacgtgagcttgatttaacctctgatgaagcgatcgagttcgccaagctgaatgcaggtgtcgttcagccgtccaaaacaggcattaatccttattatttagggctaaaaatatttgaagacattgaaaagaggtacaacaacccgacggaggaaatgaagaaaatgggcgtgcagcctgactccggccgggagaaaatgtttgaggtcagggagattgaatccgatatctctttcatccgcaattatttaaccaaagaattagtcatgcgcgaggatctttatttgtttcaaaaacagggccgagattataaaatcatcgataaacagtggaagtcggtgcgcgaccagctcgtaagcatgcgggtaaatggcggttttccatatttgacagtaaacgacggcgattatatgaaaaataacgagctctatattaagcattggtatgaaggaatagagttagatttgaaatatttggagaaagtgctcccttatttattccagctttggggaagaagcgtgcacattgagtctgtgcttgaggataaggaagtcatgttttcctacgacggaaaaggtgttcaccgcagatatttataaaaaagaggatgcagcgttctgcatcctttttattttccagtttttaaaatcttaaatatgatgtttgcctggtccgtattgttaatcaatccgcggaatttttcttttccggggccgtacgcgtataccggtacttcttcgccggtatgatcggtactcgtccatccgctgttggagcgagtattaaaaatcttgatgatggctttgtaggcccctttgcttttgtcagcctgtgcagctgcttcaacgcttttgatttcttcagatgtgaatttcagattggcatagcgggcgagcacatctttaaccggcttgccttcactgatttttttggccatgaattcaggtgttttcttagcggagagaatcggttctgcgtgccaattcttttccccgtttgcgccaatggtaaagccgccggttgtatggtcagcagttgcaatcacaagtgtatgtttgtcttttttcgcaaattcaatcgcggctttataggcctgttcaaaatctttaacctcgctcatagctcctactgtatcattgtcatgggccgcccagtcaatctggctcccttcgaccatcaagaaaaatccttttttattttggttcaggcgatcaattgctgaaacagtcatttctttgagagacggtgttttgctgtcacggtcgagcgccttagcaagccctccatctgcgaaaagcccgagcacctgctgatctttatttttcttcaatgcttgtttagttgtcacatagctgtagccggcttgtttgaattcctttgtcaagtttctgtccttgcggttaaaataagattttccgccgccaagcaaaacgtctattttatgtttgccttttattttgtcatccatatagctgttggcgatttcgtccatgtttttccgtgattcattgtgggcgccatatgcggctggagtggcgtggttaatttcagacgtggcgacaagccctgttgacttgccttgctgtttggcctcttcaagtactgatttcacttttttcccgtttttatcgacgccaattgcattgttatatgtcttaacgcctgtcgctaatgctgttccggctgctgctgaatctgtaatattatagtcagggtcatccggatgcgtcatcatcatgcctgtcaggttccggtcaaattctgttaacttcgggttattcggtgtgtcaccgttatttttcatggaacggtaggctcttatgtaaggcgtccccatgccatcgcctatcatcacaatgacatttctgatctcagctttgttttgttttttggcgctggccttttctgtttgctgcagctcagctccggcaaagattccagctgtaaggacagaaacagcggcgattggcagaaattttgatttcatattttgaaacaaattcattttttcatgcctcctttaatgtattccgtttatcacgttagggaaattttgttaaatgcggctgctgatcatgtaaacaataagtaaagccttgtaaggaaaatgaaaaaacgcttttcgttatcttgccttatttgatgtaaagcattcatttttcagaaaaatctttacctctctgtctttgcatgatatgtttgtttaaataaaaaaactgcggataaccgcagctctcctcgaatattctttatcactcatttttccggtatgtgagccgaccccgaaagtttttcatttatttcctttatgttgaaaaacatcccataaaacatgacaaaagcactcgttttttgtcacctttgcaacgaaaatgaaatatttaatacccttaaaaacttttttttagaacgaataattaagaaatttgtcacatgaagtcaagactatttctgatgggaatctatccttataatagaaatcaataagattaattaaaaaaagagatacatatatagagagttaacatttggggaggaaaatatgaaaaagcaaatcattacagctacgacagcagttgttttaggatcgacgttatttgcaggagcggcatctgcacaaagcattaaggtgaaaaaaggcgacacgttatgggatctttcaagaaaatacgacacaacgatcagtaaaattaaatcagagaaccaccttcgttcagacattatttatgtgggacaaactttatcgattaacggcaaatctacaagttcaaaaagcagcagttcttcttcctcttcttctacatacaaagtaaagagcggggacagcctttggaaaatttcaaaaaaatacggcatgacaatcaatgaactgaagaagctgaatggcttaaaatcagatttgcttcgtgttggacaagtcctgaaactgaaaggttcaactagttcaagcagctccagctcatcaaaagtgtcatcgtcttcaacttctacttataaagtgaagagcggagacagtctttctaaaattgcgagcaaatacggcactacggttagcaaattaaaaagcttaaacggcttaaaatcagatgtaatctatgtcaaccaagtattgaaggtgaaaggaacaagcacaagcagctcaaaacctgcttcatcttcatcatcttcaagcagcaaaacgtcatctacatcacttaatgtgagcaaactggtttctgatgcaaaagcgttagtcggaacgccatataaatggggcggaacgacaacttcaggctttgactgcagcggattcatttggtacgtactgaataaacaaacaagtgtgggcagaacaagcactgcaggatactggagttctatgaagagcattgccagcccgtctgttggtgatttcgtcttcttcacaacatataaatccggcccttctcacatggggatttacattggaaacaatagtttcattcatgcaggatctgacggcgtacaaatcagcagcctgaacaacagctactggaagcctcgttacctcggtgcgaaaagattctaatttttagagaaaacccgttcattggaacgggtttttttcattagacggagcacaggcgttttggttgctcctaaaaatgaaaatgtgataaaaaatccaagaattttttttctttcttattttcataaagggcaatcgcgtaagcgccagcatagggcagctgtacagactgataaggaattctgatcatctgtttctctgctaactcacgctttactgtagataaaggcagaaatgaaactccgagtccttccttgataaaccgtttcgttatatgtgtttgagtgaccttcattgttctcacaaatggaaatgtcattctgacttgacggagcaagtcgtcccagtaatcaggatgattatgggtcaaaagcaggtattgttcgagcacctctttggcatcaatttctttgtcttctatgaaacgcttatcgggcggggcaacaaggacgacagggtctttgtataagcagtggcagcttaaagaagaagactgtacctttaaacagcttagtccgatatctgcttccccggctttaatcagtgacgcgatttccgctgattcgaaaatcgtaaccgccatttctgtttccgtattcattgctgtgtaccgtttcatgacagaaggaagcacagtatctgcaataagcggagaaaccgcgagctgtaaggtttgagagtagccttgtctcactctgtgaagctctgccatgctgttttcataatcatcaagaagcctgagcgcatacggcaaatacgccctgccttcatcagtcagctggatttgcctgcctttacgctcgaacagcttgcagctgatttctttttctaattgcttgatatgtacggtcacagtaggctgagataagtaaagcgtttccgccgtttttcggaagttctcatattttgcagcggtcacaaaggtgtgaagccatttgaaatccatttctattctccctctgattaatatttttaattaattccctttaaaatattcattattttttaaatattatatttactataataacagaaaaggatagggggaattcaaatggtacattacggattaaagggaattacatgtgtggaaacatccatcagccatattgatggtgaaaaagggcgtctgatttacagaggacatcatgcaaaagacatcgcactgaatcacagctttgaagaagcggcttatttgattttatttggaaaactgccttcaactgaagaattgcaggtatttaaagataagctggctgcggaacggaatcttccggaacatattgagcgcttgattcaatcactgccaaacaacatggacgatatgtcggtgctgagaacggttgtttcagcattgggggaaaatacgtacacattccatccgaaaacagaggaagcaatccggctgattgctatcacgccttccatcattgcatacagaaaaagatggacgcgcggtgaacaagcaattgcaccttcttcccagtacggacatgtcgaaaactactattatatgctcacaggcgaacagccttcagaggcaaaaaagaaagcgcttgaaacctatatgattctggccatggagcacggcatgaacgcatcgactttttcggcacgagtcacgttatcaacagagagtgatttagtgtcagccgtcacggctgctctcggcacgatgaaaggtccgctgcacggaggcgctccttctgcggtgacaaaaatgcttgaagacattggagaaaaggaacatgctgaagcatatctgaaagaaaaactcgaaaaaggagagcgcttgatgggattcggccacagggtgtacaaaacaaaagacccgcgggcagaagctttgagacagaaagcagaagaggtggccggcaatgaccgtgatcttgatcttgcgctgcatgtagaagcagaagcgattcgtttgctagaaatctacaaaccgggacgaaagctgtacacaaatgttgaattttacgcggctgcagtgatgaaggccatcgattttgacgatgaattgtttactccgaccttttcagcaagccgaatggtagggtggtgcgcccatgtactggaacaggcagaaaacaacatgattttccgcccgtcagcgcaatataccggtgccattcccgaggaaattctttcataacatattttggcgtttattcatttctgtcgtgtggtaacgttcagtatcaaccacatgtctaggagtgatgaatggtgaacccaatggacagacaaacagaaggacaagaaccgcagcatcaggacagacagccgggcattgagtcaaaaatgaatccgctgccgctgtcagaggacgaggattatcgaggaagcggaaaactgaaaggaaaagttgcgatcattactggaggcgacagcggaatagggagagcagcagctattgcctttgctaaagagggggctgatatctccattctatacttagacgagcattcggacgcagaggaaacacgtaaacggatcgaaaaggagaatgtccgctgcctgcttatcccgggagatgttggggacgagaaccattgtgaacaagctgtgcagcaaacagtggaccattttggtaaactcgatatcttagtgaacaacgccgctgaacagcatccccaggacagcattctcaatatttcaacagaacagctggaaaaaacctttcgcacaaatattttttccatgtttcatatgacgaagaaagctttgcctcacctgcaagaggggagtgccattattaatacgacatcgattaccgcttatgaaggggatacggcgttaattgattattccagcacaaagggtgcgattgtttcctttacgcgttccatggcgaagtcgcttgcagataaaggcatcagagtgaatgcggtggcgcccggtccgatttggacaccgcttattccggcgacattccctgaggaaaaagtgaaacagcacggcttggataccccaatgggaagaccgggacagccggttgagcatgcaggcgcctatgttctgctggcgtctgacgaatcttcctatatgacagggcagaccattcatgtgaatggcggccgttttatttcaacgtgatcaacgaaaaaccagctctagagctggtttttttgtgtggtaaaaaatttcaaaataaaaaatttgtcgatttttctaacaattttgttttcatttttgcaattttatatataatattgagtaggagaaaggaatgattcgcgaccagtacaaatatagtagaaaaaaagaaaaatgaccattgttactcatgaattcagaaaattcaaataaaatatataaaaatagatgatcgggagttgaaggggaatgaaagggagcgtttttaggaagaaaagcattcaggatttaatcgctgcgacgagcggggaaaaatctttaaaaagagaattaggggcatttgatttaacgttgcttggaatcggcgccattattggcacagggatttttgttctgacgggaacaggcgcagtcacggcaggtcccgggctgacgatttcatttgttgtggcggcgttggcttgtttattcgccgccctgtcttacgcggaatttgcgtcaagtgtgcctgtttcaggttcggtgtatacattcacttatgcgacattgggagagcttatggcctttattatcgggtgggatttaattttagaatacatgctggcggtaagtgcagtgtcggtcggctggtctggttatttccaatcgtttttatcagggctcggcattcatcttccggttgctttaacagcggcaccgggcgcagtgaaaggcacctttaccctgtttaatcttcctgcattcgtcattgtaatggcgatcacatatttgctttatttaggcatcaaagaatcaaaaagagtcaacaatatcatggttatcttgaagatactggttgttctgctgtttatcgcggtggcagccgtttacgtgaagccgcacaactggcagccgtttatgccaatgggctttggcggcgtattcagtgcagcggcgctcgtattctttgcttttatcggatttgacgctgtatcctctgctgcggaagagacgaaaaatcctgcgaaagatctgcctaaaggcattattttctctttactggtctgcacgattttatatgtcaccgtatcagcgatcatgactggggttattccgtttgctcaatttgcgggtgtggatcatccggtttctctagttcttcaaagcgcaggacaaaactgggtggcaggcatcattgatattggcgccgtgttgggaatgacaacagttatgctcgtgatgctttacgggcagacacgcgtcatgtttgccatgtcgcgtgacggacttgtgccgggttcactttctaaagtgcatccaaagcacaaaacaccttatgtagccacttggtttttcggaacgatgtcggcgcttctcggctcacttgttccgctggatgaacttgcaaagctggtgaacatcgggacgctgtcggcatttgtacttatttctgtggcagttatcgttttgagaaagaaacagccggatcttccgagagcctttaaatgcccgggagttccgtttatcccgggcctggcaattctgttctgcctgttcttgattttaaatctgggatgggtgacgattgtccgcttcctagtgtggctgttaatcggcttggtaatctatttcctgtattcaagaaagcattcaaaattaaatcaataaccttttgataaagagagcggccatacaggccgctctcttttctgttcctggcaaatgaatctatagaaatgaagacaaaaataagagataatataggctggaaaggaagtgacgtttattgtctgagcaaaaaccagtccaatgggcttcgaaaatcggtttcgtcatggcagccgccggctcggctatcggcttgggcgcgatttggaagttcccttacgtagcggggaccaatgggggaggagccttttttcttatcttcgtgttatttaccatcctcttaggctatccgcttttggtgggggaatttatttttggaagacggaaccagacgaatgccattgatgcatataaaaaagaagcgccgcgatcagcttggtttcttacagggtggatcggtgtagccgcgtgtttcttagtgctgtcgttttacagtgtaatcgggggatggattttgctgtatatcgtgaaaacagcgtcaggatcactgtccgggctttctcaagcacagtatggcgctctttttgcttctattatccaaaatccggtgcagacgctcgtggctcagcttgtctttatggtacttactgtcatcgttgtcgcaagaggggttcaaaaagggattgaacgggtaagcgcggtgatgatgccgattttgtttttattgtttattctgctcgttcttcggtctcttacgcttaatggtgcaatggaaggcgtaaagtttctgcttgtgcctcatttcggcgatctgactccggaatccatattattcgcgctgggacaggccttctttacgttaacactgggggtttcggttatggtgacctacagctcctatttgccgaaaacacaaaatatccctcgttcggcagcctccattgtcttgatgaatatcattgtgacactcttggcaggtttggctatttttccggcggttttctcattcggttttcagccaaatgaaggaccgacactgctgtttacagtgcttccggccgtttttgaacagcttccgttcggcacgttgttttttatcggttttctcgttgcatttttatttgcagccttaacctcagcattttcgatggttgaaattatcgttgccacaatcggaaaaggggacgaaaagaagagaaaaaaactgtcatggacgagcgggcttttgatctttttggtcggaatcccatgctgcttgtcttatggcgttttgagtgatgtgcacctatttggcaaaacgttttttgatattgccgattttaccgtcagcaatgttttgatgccttcaggcgctctgttaatttctctatttatcccgctgaaaatttcgaaaagcgaactcttggctgaaatgcgaaatggatcaaatgcaggtaaagcattcttttacacgtggttttatttgcttcgttttatcgtgccgcttgccattattatcgtgttcttaaatttaatcggaattttatcattttaaaaaaacaggctccgtttccggggcctgttttttatttaataagatgatatcaacggtgcccatgccgttttcagtttttggatgccgagcctgatgtcctcttctgacaaaccgccataaccgattaagacagaagcaaaaggcgtctgttctttatatgagggagacacgggatagatggttacaccgtggtctgcggctgcttgtattgcttcttcctcacttgctggaaacaaaaggcgcagcaggatgtgaagccccgagttcttaccgagaatctcaacggtgtttcccagttcagagcggatggcttctaacaggacagcgtgtttttttcggtataagcttctcattctatttatgtgtttttgccactctccggtttcgatgaagtctgccagtgccaattgtgagtgggcagaaacggtctgcttcattaactgagcattgtttttgatcggttccatgagttcatggggcacaatcatgaagctgagccgcaaggaaggcagaagtgactttgaaaaagtgcccagatatatgactctgccattcggatcaagactctgtaaagacggaatgggatggccgctgtagcgaaattctccatcgtaatcatcttctataatgaatgaatttgtttctgccgcccatgccagcagctcctgtctgcgggtaatcgtcataatggtcccaatcggaaactgatgcgaaggagtcgtatacatgagataaggattctgacggtagagctcatccggcaggacgccttctgcatcagaacaaatcggagtgacatccatgtgatttgcttcaaacatccttcttgaacggtgaaagcccggttcttcaaagccgatttttgtacctggctttagcgaaaggcaaagaatttgcagaagcacggtggttcctgcgccgatgataatctggccgggttcacaatttactccccgagacagcctgacgaatcgggcaatcatgtgcctgagttcgtattctccttgagggtcgccagaggtgtgaaacgatccggaatagcgatcaagactttttactatgctttttctccatgcgttaaagggaaagagggtcgggtcaacgctgccctgatggaagtcaatagcaggtgcgttcttttcatgtaatcccggctgtacagactgctgaaaatggtcaggagctgtcgggaatcctggttctacttccgccgcgaaccagccgatttttggcttgcttttgacatagccctcagcagttaattgctcataagctcgttctatagttgccgtgctgacatcgagcaagctggagagcctgcgttttgacggaagtcttgttccctttgtgattcgcgcatgtgaaatttctagtttaaaaaaggtataaagctgctcatacagcggtgttttgctctttttatcaagaaacggcgtgatatccatctcgtgtctcctttttatctggcatggttattttttctgatattggctatttggcaaatgccatttattagctatgatcattgtaacgaaaggaaaggggattgagaagatgatccatatgaaacaattaacctcgaaagaagaatgggctgagtcgtatccgattatgagtgaattgagaacagaactggatatagagacgtatttacaaaggcttgaagcctgtgtgcagaaagaatcgtatatgctgtttgccttatatgaaaatacagcaatcagagcgctgtgcggggctctgccgagagtttccattcataaaggagagcacttgtggattgcggatcttgttacaacggcaccttgccgatcaaagggatacggcaaaatgcttttggattatgcctcagactgggcgagaaaagccggacttggttttgtcagtctttcatctggccttcagcgtaaagacgcacatcgattttatacagataaaatgggttttactatagaaagttatttgttccgaaaaccggtataacgaaaaaagacgcctgaaaaggcgtcttttttaaaagccaaactgtaaattcgtatctacagatacaatggtatacacacaaataatcacaaagagattaaggatgacgccgagcaggccggggcctgtgcgccctctcttgatgaagagttcaacaacgccgaacggaacggcagccatggcgaatggaagcatttgataggaataaaacgtgacattgctgataatggccaaattcagcaacagcagggacagaaccgctgtcccgacagagatccagccgaatacattgtgttctttaaaaattcttaccagttccataattccacctcgccgacattcgctgattttacagatttatttttcagcatgcgctggatttccttggttggccctgtaacgaccgaaccgtatacattgacaccgtttttctctacataatctaatcggttatctacattcaggtctttccgttttgaaatgacctgagcccatttttcgtgtttggacatgaattttagggcgttgataaactgatcgccattcgacttgccttttgtattaagggcggccaagaactttgaatcctttccaggatagccaagaggttctgtggaagctgtcttatttgtgtttttctctgtttcgattgcgttccacaaaaagctcacatcatagcctttgaatttgttatacacgtcttttgtcggatatgcacggtcatatgaaaggtagacctctgataccgttccttcaggcaatgtgcttaacgttttttctgcttttgcggtcgtttgttcagacttgtttgaaggatgtgtaaagtaatgtccggttttattcacttctaagtcatagtagtttactgccggcgcttttactttgttataaaacatttcaacccgttcattccctacggcagccgtcttcgtgccaatctgcttttgcagcgggaattccgtattcattccaaatagcttcacttggcttttcagtccggaagtatcaacaagaacattcggcatggtcagggctacagtgactgcggcagtttccataaactcattgccggtgctgtgtttcccacccattccgtaatagaggtagcttcccagcgtacaaagcggcaaaatcatcaatgtcgaaatgacggcaagcacagaaattcgcaaataagacttgcgtttgccgtaggctaaaatcgctttttgtttttcaggactgatgctgagatcccaatcgttatcgtcctctagttcgctgtcaatcagttcctgatatacttcgagcttctcaagttcttcctcaaatgcagtcatttcctggtcgctcatttccccatttttatattgatcaaaacgctttttaaattcttcattcatcattaacacctctattataaagtgctttcagccgctgtctggcacgaaataaaacacttttaaaattcgcctctgaaatattcataatatgggatgcttctttgtagtttaactcttttaaataatatagcgttaaggcctcccgataattatcggggagctcggacatataaccagtcagcacttcctttatctctacctgatgggcaggactttgaacagcattttgaaagaggcttccgattaagtcatcagaaatggttacttctttcttatgctttctgacgtaatcaatgaaggcgtttcgcgccacttgaaaaagccagggctttactttgctgtgatcataggagtgaatgtgtatgtatgcccgcataaaggtttcctgcagtaagtcttcagcaagatgcttgtcttttgtcatggagagcaggaacctgtaaacatcattcatgtacatttggtaaatttcatcgatcgtcactgccttttctcccctctatgttatacacgcataagaaaggtttaaagttgcacattacatgcaaacggcttttttatacctaatcaaacaccattactatatagtacccaaaaatggccgcaaaagatagtgcggagaaaggtttaacattttttccagaggggaaaagatagtgaaaaagtgaaggagtggcacaatggaatataccagtatagcagatacaggaatagaagcctccagaatcggcctcggcacatgggccattggcggaacgatgtggggaggcactgatgaaaaaacatcaattgaaacaatccgcgccgctcttgatcaggggattacactgattgacaccgcgccggcttacggcttcgggcagtccgaggaaatcgtcggaaaggcaatcaaagagtacggcaaaagagaccaggtgattctcgcaacgaaaacggctctggactggaagaacaaccagctgttccgccatgcgaacagagcgagaattgtagaggaagttgagaattctttgaagcggcttcaaacagactatattgatctttatcaggtgcattggcccgatccgcttgtgccaattgaagaaacggctgaagtcatgaaggaattatatgatgcgggaaaaatccgggcgattggcgtcagcaatttttcaattgagcaaatggatacatttcgcgccgtcgcacctctccatacgattcagcctccatataatctgtttgaaagagagatggaagagagtgttcttccttatgcgaaagataacaagataacaacattattatacggcagtttatgcagagggctgttaacaggcaaaatgaccgaagaatatacatttgagggcgatgatctgcgtaatcacgatccgaaattccagaagccccgctttaaagagtatctttctgctgtcaatcaattggataagctggcgaagacacgttatggaaaatcagtgattcacttggctgtcagatggatcttagatcagccgggagcggatatcgctctttggggagcaagaaagcctgggcagcttgaggccctatctgagattacaggctggacgctgaacagtgaagatcagaaagatatcaatactatattggaaaatacgatatcagaccctgtcggaccggagtttatggccccgccgaccagagaggaaatataacaaaagctgagggcgaatcctcagctttttggcgttttaacgggagaaatcttaaaaattagtaccaggtaataaaaaatgttgttataatagaagatagaaagaatcattgattacgacaaaggaagtgcgatatgtataagttttgtgcaaatgctttaaaagttattctttctcttcgcggaggagtgaaggtgtataacaaagaaaaccttccggccgattcaggttttgtcatcgcgtgtacacattccggctgggttgatgtgattacactcggagtcgggattcttccttatcaaatacactacatggcgaaaaaagagctttttcaaaataaatggatcggttcgtttctgaagaaaattcatgcctttccggtagatcgggaaaatcccgggccaagcagtattaaaacgccgattaagctgctgaaagaaggagagatcgtcggtatcttcccaagcggaacaagaacctctgaggatgtgcctttgaaaagaggtgcggtgacgattgcgcaaatggggaaagcgccgcttgtccccgctgcatatcagggcccttcaagcggaaaagaattattcaaaaaaggaaaaatgaagctgattatcggtgagcctcttcaccaggctgattttgcccacctgccttcaaaggaaagacttgcagcaatgacagaggctttgaatcagcggattaaagaactagagaataaacttgatcagctataaggcgttctgagagattgccctgaaactgtgaaaataagaaaagcaccttatacaaggtgcttttcttattatgcttcctgctggttagctgtctccagaagttcttcttcttgaagctttttcacttcaatatatgcgacgtggtggccgtcaatttcattaatgatgaattcgcagccctcttcgatgatggaatcatctttttcaacatcgtatttttgagtaaggaaccagccgccgattgtatcgacttcttcgttctctaaatgaatgcctagcaggtcgtttacttggtcaattaacacttttccgtcaagaatataatggccttcgccgattttgcggatttcgctaatttcatcaatatcaaattcgtcgcggatttcaccgacaatttcctcaatgatgtcctcaaccgtcacaagcccggcagtaccgccgtattcatcagacaatatggccatgtggaccctctctttttgcattttgacaagcaggtcttggattggcgcagattcaatgacatgaatgatcgggttgacgaattgagaaatggtggaatcaacagatacctcaccgctgatgcaggcggtcagcacttctttaatgttaataaccccgataatgttatctttatcgccctcttccacagggtagcgggtatatttttcaatctgaatgatgtccatcatttcagaaatcttgatatcatgcggaaggctgacaatttcagtccgcggaatcataatttctttcgcgagcctgtcgtcaaattcaaagattttattcacatatttaaactctgattggttgatttcaccgcttttatagctttcagacaaaatgattcgcagctcttcttctgagtgtgccagttcgttttctgaaacggtctccaggccaaatgctttggtcaataaccgtgcggaattgttcaaaagccaaatgaatgggaacgcgatgcggtaaaaccaaatcagcggtttcgcaaacagcatagacactgcttccgccttttggatagcgactgttttaggtgcaagttctccgacaacaacgtgtaagaacgtgataatggcatacgcaaaaataaacgatatgacatgtgaaagggaacctggaacattcatttggacgaaaagcgggtgaagcagcctttcgatcgttgattcacctaaaacccctaatccgatggaagtcaatgtaattccgagctgacacgcagataaatattcatcaagatgcgtggtcactttttttacggctattgctgctttatttccttccgcgatcagctgatcgatccgtgagcctctgattctgataatggcaaactcagatgccacgaaaaatgccgtcagggcgattaaaacagcaactaaaatcaaattcactatgtccaattagaaccttcactctagcaatgagaatgaaggtaacacctcctgttagataaaatggttttaacttaacagcagcataaatgattggaacacggcgagcttttcaggcgggagtttgcttttcagcttgtcacgatcctcgggcttcagccgttcaaaccgatgcaagattccggagatgttttgattcatatgatcaatttctaatgccagatttccaatttcatcatcaagtttagctgaagagggaaactggttctccagtcgatctttaatatcggacagggccaatcgctgcttcttgcaatctacaataaatataagtcttttgagtgcattttcgtcgtagtaacggtaatttgaacaggatctggccggcgtaagcagaccaagattcgtataataatcaactgtccgtttcgttactccggcgagtgccgctagttcactgatgcgataagtctcagccccatctatatccctcccaaccatcacgttatagttatgagaatagtttaatatatgaatggtgtcttgcacaagtttattgttttttttagaccggaattggaagttgtggaattcatcatctgattgaagtaacataggaagatagaattttcaaacttttatatacggaagggacagatgaaattggctgggttatcccgggaagttgaagaaaacttaaataaaggatcatggattcgcaagctgtttgatgaaggtgcaaggctgaagaaggagttcggggaagaccaggtatttgatttttcactcggcaacccgattattgaaccgcctgaagcttttaagagagcgttaatagaggaagctgaaaaaggcagccacggatacatacaaaaccaagggcttcctgcagcgagagaaaaagtcgcgcaatttttggggtcgcgttttgaagctgatttctcagcggagcgtatcgtcatgacggtgggcgcggggggcgctttgaatgttgcgttaaaaagcatcgtaaaccctggggaagaggtcattattctcgcaccttattttgccgaatataagttgtatattgagaactacgggggaaaagccgtcagctgcccgttgacaagccggtttgagatcgacattgaagcggtaaggcaatcgatcactccacagacgaaag

SEQ ID NO: 13 - DNA, 1000000 bp, Bacillus subtilis
ggctgatcctcaatacaccgcataaccccacaggcactgttctcagccagaaaaatatagacgatttaggcgctttattaaaagaaatagaagagaagagcggccagacgatttatgtgctgtttgatgaaccgtacagtcaattaatctatgatgaagagctggcaaatccgtttcaatcgtaccatcgtgtgatattggccagctcattcagtaaagatctcggcatagccggggagcggctcgggtatatcggattggacagccgaatgccggatgcggaccttttgatcaacgcttttgtgtattgtaatcgaacgcttggatttgtgaatgcccctgtcatgatgcagcgggctgtggcacgaatggatgatttaagagtagacgcgagtgtttataaagagcgccgggatttaatggtagacattttaaaagaagccggttttgaatttgaaatgccaaagggaggtttctttgtttttccaaaatcgccgattgaagatgaagttgcattttgcgtgcatgccgcccaaaaatacaaattattaattgtgccgagcagcggttttggaatgagcgggcattttcgattatccttcagtgtgccgatcgagcagattaaaaactcacgggacattttcatttctttatataaagattttgcttaagaaggcaaagaaaagaaaacagttttcaaggctgttttctttttatatccacaaaatccttcctcttccaatccagacaggcgaagaattgacaagcaggcatgcagttaagtctttcttcatgataaaagtctaaaaattaaaaatcatttttggaatgagttgtgttacaataaaatatacaatttataatcaaactttgacttttggaggtggtaagatggggccctctgcttaggcaacaatacaccgcgtacctcaatgttaaggaaaaatgattatatcaggaggtgactccttatcctttgttgagaggatagggttaaatggacgatattgacagtctgattttaattggcgtgctcattgctttaaccgcgtttttcgttgcaagcgagtttgcgattgttagagtaaggagatccagaatagatcagcttatcacagaaggaaacaaacgggcgatactcgcaaggcgtgtcattacagatttggatgaatatttatccgcatcccagctaggcattacattgacatcaatcgggcttggcgtactgggtgagccggcctttgaacggctgctgcatccactgtttgaaccgctcggcttgccggactcggtttcacatgcagtctcttttgcagtcgcgtacggcttgatcacgttcctgcacgttgttgtaggtgaacttgccccgaaaacggtcgcgattcaaaaggcagaacagctgactttactgatagcgggccctttgcgtttattctatttgctcctgtttccgtttatttggatcctcaatggatcggcgcggcttttatgcgggatgttcggtttgaagcctgcgtcagaacatgatggttcccattctgaggaagaactcaggatgctgttatctgagagtttaaaaaacggagagattaatccgtctgaatataaatatgtgaataagatttttgaatttgataatcggatcgccaaagaaattatgataccgcggaaggaaatggctgctgtgtcaactgagatgacgatggccgagatgcttgaagtcatgctgaaggaaaaatacacgcgctggccagtcacagatggagacaaagacagtgtgatcggtttggtcaatacgaagcatttgttttctgatttgctgtttatgacagaagaagaacgaatgaagatgacgatccatccgtatgtgaggccggtcatcgaagtgattgaaacgatcccggttcatgatttgctgattaaaatgcagcgcgagcgcattcatatggcaatattgtcggatgaatacggaggaacctcgggacttgtgacgacagaggatattcttgaggaaattgtcggagagatcagagatgaatttgatgaagatgaacagccgctgatccaaaagcttggcgacggccattatgtgatggatggaaaggttcggatcgatcaggtgaacagccttcttggcgcatcgattcaagaagacgtcgatacgatcggcgggctgatattaaaagaaaacatcgatattgaggctggtgaatccattcgcatcggttcatattcgataaaggtgctgaagatggacggccgattaatcaagcaaatcgatataaaagaagaagccggcaacacaaccgggattacggcgcaccacaagctgctgctgcccgatcctgtgatgctgaacagtgcaaccttgagcgagaaataagctcaaggtttttttacattgtgattgtccagccgcaccaaaatgccaaaagcgatccgcaaagtgtcagggcgatgtacaagatgctttctattacacgtttggccataaggagttgaatagtttcaacgctgaaggtggaaaaggtcgtaaaggcgccaaaaaaccccgtgccgatgataagcgagaccgaagcatttgcaacgtgaagtcctgtaaatattccgagcccgagagctccgagaatattgactgtcagtatgccaatgggcaggctgagacctttggttttggcggttatgacattgccaagccagaagcgaagcattgcgccaagtccgccccctatgaaaatacccgctagtgtcatctttcctgcagcccctttctttgctgaatgcctgctatgcgccgtcccgcaaaaacaccaatcagtgcaaatatgatccctgatatcaatgaggctgccacatataaaagagccaatgagggttgtccttgcaaaagcatcactgtttccttagaaaacgtggacattgttgtgaagcctccgcaaaagccggtgcctaaaaaagccgacagcagaggccgttttgccccgatcagaaaaaatccggtcaaaatgcctaatagaaggctgcctgccgcattttccagccaggttgccgccgggaactgaccggtgtgtatccataagtttaatccgtatcggaggcaggcgccaagcgcgcctccgataaaaaccgcgctatatattttcatgtttgccatcctttatgatgaaatccgggtaatctgtaacgatgccgtccacgcccatggcttgtaattttgccgctgtcttttgattgttgacagtccatgcaaatatgtttaagccatttttatggatggagccgatcatcagacggttaagccgtgtgtgttttatattgacatagtttgcaaaagagcggaaggccttcatctgatttctggacagcatgccaaagttgggccttgtaatgaccgctgtcggaatcgaaggataaagctcgcggaacctttggacggagcggaactgaaaggattgaacaatattattgatagaaaaagaaaattgccctaatagctgtcccacctcttcttcaattccgacttgagacggatggccttttagttcaattaaaaggccgatttttttgtggtagcgcttgagcaccgcttccagggttggaatacgctctccttgaaaagcgggaccgtaccagcttcctgcatcgagtttttgcaattcctccaaggtaaaatccttaacaaagcccgatccgtttgttgttcggtcaaccctgtcatcgtgtatcacaacaatctgcctgtcttttgtaagctggacatccagttcgatcatatctgcattcattttcaccgcaaggtcaaatgcggcaatcgtattttccggagcgtagccggatgctccgcgatgggcaatgatgtacaagctaagtcagctcctcgtatgggcatttctgttattgtatcaaatccatatatgcaccgcgatacaaactggtgaattttttctgccatatcggaatggtccgggctgaggaatgcgtataactaaaaaaagacactcagcgtatcagaacacatttcgtcagaaaattaggtctttcgacatgttcacaacaaaatatgatcctttataatagcaaaaaaggaggcgagatcatgggaaaagggagaatcagagtggaggaaagaattaaagccgaaacggatgctgaaatgcaaaaagcaactctccttgatcagacacaaacgaaaaaaggtaagtgactgtccctattgaatctggctgatagatgaattgagaaatgaccccggcgtttcgccggggttttgtgctgcaaaagacatttaaatgaacatccttacgaatattttagtataataaacaattgattgggatagaggggagacagtcatgccggattatctgcagcagtattttacgcttgataacatcatacaaatcggcatcagcttggcgattttgctggtgtttcttatacttagaaaattattcacaagatatttctttaacctgctttttaatttgacaaaccggccgaaaacagaaatttttaaacaggtggttctggcgtttgataagccggccagatggttttttgttgcccttgggctgtttttagcgatccggtattcaccgtttttagatgagcaaatgccggtcatcagcaaaatataccgctcactgattgtggcgcttttgtgctggggtctttgtaatttgaccgcaacatcgtcgtttatcttccataaggtgaatcagcgcttcgagcttgacatggatgacattctggccccgtttttatccaaattgctccgttttgtgatcattgcgctcagtgtcagtgtgatcgctcaggaattcaattatgatgtaaacggatttgtagcgggccttggtcttggcggactggcttttgcgcttgccgcgaaggataccatcagcaacttcttcggcggtattatcattattactgaaaagccgtttacaattggtgactgggtggagacgtcgacagtaacaggatcagtcgaggatattacctttaggagcacgagattcagaacagcacagggggcgcttgtaacggtgccgaactctacgctgtcgatggaagcgatcacgaactggacaagaatgaccaaacgccagattacgttttccatccatgtgtcctacgctacgccgattgagaaccttgaacgctccattcattctctcagaacaatgctcttagagcatgagggcgttgataatgaaacaatcatggtcaactttgatacgtttgccgacagctactacaatttattttttaacttctatacaaaaacgacggtttgggctgaaaaccttaatattagagaggatatcaactataaaattattgagattttaggtgcagaaggtgtccagtttgcatatcccggccaaatggttgttgtcaagcaaaagcacgaaagtgacccattccaggtgaatctaaataaagaggaaaaggaacgggcttaaaagagagacttcgtctgacagaggcggagtctttttcatggtaaaataagagaaaaaggcggtgttgagttggaaacattcaaaagtattctacatgaagcacagcgaattgttgtgctgaccggagcgggaatgagcacagaatcagggattcccgactttcgttcagcagggggcatttgggcggaagatgcctcaagaatggaagcgatgagccttgattattttttaagtcatccgcgtctgttttggcccaaattcaaagaattgttccagatgaaaatgagcggcagctttgaaccgaatgaaggacacttgcttttagctgagctggagaagcaagggaagcaggtcgatattttcacgcaaaacattgacggtcttcataaaaaagcggggagcaggcatgtatacgaactgcatggttctatccagacagcagcttgtccggcatgcggcgcccgatatgatcttccccatttgctggagcgggaggtgccggagtgcacggcggccggaaacaatggggacatttgcggaacggtattaaaaaccgatgttgttctctttggcgacgccgtcatgcactttgacaccctttatgaaaagctggatcaagcagatcttttattggttatcggcacgtctctcgaagtggctccggctagatttgtgcctgaggatgcaagtctgattcccggcatgaagaaagtcatcataaaccttgaaccaacgtattgcgacagcttgtttgacatggtcatccatcaaaaaatcggtgagtttgcccgaagtttgggcataaaaaagtgagccgccttatgcgcctcacttttttattcatgaacaggaaccattgtgtcctctaacactccgaaggaatagcctttttcttttaatttattgattagtaccggcagcgcgtttacggtagcgggaagatcatgcatgagaatcacattcgggcggcctgaagagctgtgttccatattttcaagctgctctaacacggccgtcacatactgtgaatttcggtatttccagtccatgctgtcaatcgtccaatcccagtacacaaaaccgtctttctcaagattgcggatttgtgagggggttagtgacggtttgcttccgtagggcgttctgacaagagcggttttatatcctgtaatgtcctgcagtgtgtcacgcgcctcctgcatttcttttagcggagatgtcggtgtttgatagaacaatctgttattgtgggtaacgccatgtaaaccgagtgcgtggccttccttttctgctcttttcacagcctgcttgaattcgttcatccgcggtgacagcataaaaaacgtcgcttttacatcagcgcttttcagtacatcgagcaagcgggttgtaacggctgaagggccgtcgtcgaaggttaagtaaaccgttttatctcccatgttctgctttgtctgcagatgttttatcagcagatcgggggagtcgtttttcagcttaaggctttctttctcatctcgaagctggccgtttgttgtgacagtgacttcctttgctttcgttgaactgttggaataacccaaaatcaccataagcaaaagcagcacacataaaactgctaaacttgcaaatttaaaagcaagcgaaactgcagaaggagaagcctctcctctcgtttgtcgcataacaatctctccattggcataaaatctctacataatgctgtacagcaggcagcttatgaagatgccttatgtttacaacctatgtattaccagtcaagtatacaggaataaaactggaaagcacatagaaaatttgtcgaaatgtcagattttaaggaaaaaataaactcctttccgctatagatctcttgatctttctgtttttcggcttgtccaatatggtagaattagtgataatgacagcttgaatgacatcagggacatctcgaaaagggagggcttttatgaaggttttagtcaatggccggctgattgggcgcagtgaagcatcaatcgatttggaagatcgcggttatcagtttggtgacggcatctatgaagtgatcagggtgtacaaaggagtattgttcggcttacgtgagcatgcagagcgttttttcagaagtgctgctgaaatcggaatttcactgccattcagtatagaagatctcgagtgggacctgcaaaagcttgtacaggaaaatgcggtcagtgagggtgcggtatacattcagacaacaagaggtgtggccccgcgaaaacaccagtatgaagccggcctcgagccgcagactactgcttatacgtttacggtgaaaaaaccggagcaagagcaggcatacggagtggcggccattacagatgaggatcttcgctggttaagatgtgatatcaaaagtctgaatttactgtataatgtcatgacgaagcaaagggcctatgaagcgggagcatttgaagccattttacttagggacggcgttgttacggagggtacatcctctaacgtttatgcggttatcaacggcacggtgcgaacacatccggctaatcggctcattctcaatggaattacacggatgaatattttaggactgattgagaagaatgggatcaaactggatgagactcctgtcagtgaagaagagttgaaacaggcggaagagatctttatttcgtcaacgacggcagaaattattccggttgtgacgctcgatggacaatcggtcggaagcgggaaaccgggaccggtgaccaaacagcttcaggctgcttttcaagaaagcattcaacaggctgctagcatttcataaatgaacgaagaaaagagcccgctttatacagcggagctctttttattttttaacaaatccaatcaaaatggagatcatcggcgatatatagaggaagaacgtaaacgggatgtagtctatgactggaacaccaagtgcgctcgccataaatgcgccgctgacgccccaaggaatcaatgggttaattaatgttccgccgtcctctaatgaccttgtcagaaatttgcgctggatgttttgtttgtcatataaggatttaaatgattgtcctggtattaatatcgataaatactgttcaccggttgccaagttgacgccgatgcttgagcagacagttgctgcaactagacggccttttgagcggatgcctttcatgatgccttccaatagtgcagaaatcaatccgattttctccatcaatccgccgagtgcaaaagcaatcataatgagagagacagagcccatcatggattgcaatccgcctctgttgataattttagcggctgcctcattgtcagtttcgaaagttgtgccattttgcaaagctgtcataaacgcctgcaggctgctgtcgggtacaaaaatagcagtcaaaattcccgaggaaataattccggcagtcagaacggggattactgatacccgtttcattgccagcaaaacgactaagagcggagaaagaagggcccacggtgtcacgtttgcaacatcttttattccggttatgacctgctgaatattatcggttgaagcagcgtccgctgacactgatgaaccgagaaagtaaaacagaacgacagtgatgagcaaagctggaatggttgtgcccatcatatggcgaatgtgttcaaagatcggtatttcgcctattccggctgcaaagttggttgtgtccgacatcggcgacattttatccccaaaacaagcgccgcatatgactgcgcctgctgtccattcaagcggaacgccggccgcgctcgctacgccgatcagcgctaccccgattgtgcttacagttgtcaggcttgagccaacaagtgtgctgatgatcatacatgaaaacaaagcagtcaacagaaggtggcttggttcaataaaggatagggcataaactgtcacagtcggtattgcgccgctgtacatccaggcgccgattaagatgccgatcagcgctagaacaataatcggctgtacgccgtttttgatcccgtctacaatccctttttcaatactcttccaggaaaatccaaaccataaagctgctgctgaaagcatgacaacacttaaaaacagcgggatatgaggttctacatgaagcaagaataagcaagaaataataatgcataacatgaatataaataaaccgacggctaacggaaacgtcagctttttttgagaatccaaaataacaccccatatttatctttaatgcttttgtgcttttgggcacgaaagcattataacagaaaaaaacgaaaatctatgttttttcacaattatgaatataaaagaagtgagcacagggcgtgctcactttacaatcaggacgggtatatccgatttcgctgaaagcttttcacttacacttccgaatattagctttttcagcctgttttggtctctgcttccggttacgatcatatcggcagaaatgcggtttgcatgctcgataattgattcagccggatcgccttctaatatatcgatatctccatctgcctgctgttcattcagcatcattcttgcttcggcgatgacttcttccgtacggtcttcatagatcattggctcaggtgatgttacacccgatatcagcggatcaggaacacttgtcatgcctccgctgatatagcttgcctcagctgcgggtctgggtgggtcgatgacggtctgattgtctttcatatcatgtgaatgggcgacggtaatagcggcatttaaggttttagcaagatcaatggctgtctgaagcgctttcttactattttcacttccgtcaaacgcaacaatgatacggtcagcatggaacatccttctcaccctttcaaagcgtcttacaacactactacccgaatttgagcacaattaaccttttcctattcaagtaatgattgacaataaaaggttttgtttatatgatgataaaaagatgaaatcagaatggaaggagggtttgctatgccaaggaatttgcgtgtttatcaaacagtttcatattggcgcggcaaaccttttgttctgttttcgtgaacggttttttaggtcggaccgcgcgctgaaaagcgctgtgcgtaacatatcggttaaaaaaggcatggagctgacgcttcatgccttttttatatacaaaatctaaggaaagacaggtgtatgggatgtgaagacaaatacagaggcgagggctgttcatgccaaactggatgaaaaaagctgcaaggaaaaaatagaaggcggctgataaggagatggggatagatgttttcagttttgaaaaagcttggctggttttttaaggcgtactggctgcgctatacgattgcgattgtccttttattagcagtcaatgtcattgaaatgtttccgcctaagctcttggggaacgccatagatgatatgaaaacaggggcatttactgcggaagggctgctgttttatatcggtatcttttttgtgctgacggcggccgtgtatatcatgtcttatttttggatgcatcagctgtttggcggagcgaatctgatggagaaaattcttcgtacgaagctgatggggcatttgctgactatgtcgccgccgttttatgaaaaaaaccgaacaggcgatttaatggcacgagggacaaatgatcttcaggccgtcagtttaacgacaggatttggcatcttgacgttagtcgattctacgatgtttatgatgacgatctttttgacaatggggtttttgatcagctggaagctgacctttgccgccattatcccgcttccagtcatggcgattgcaatcagtctatatggaagtaaaattcatgagcggtttactgaggcccaaaacgcgttcggggcgctgaatgacagagtgctggaatctgtttcaggcgtgcgggtgattcgcgcgtatgttcaggaaacaaacgatgttcgccggtttaatgaaatgaccgctgatgtttatcagaaaaatatgaaagtggcttttattgattcactgtttgagccgacggtgaaactgcttgtcggcgcaagctatctgattgggctcggctacggagcgtttcttgtattccggaacgagctgacgcttggagagttagtgtcctttaacgtttatctcggcatgatgatttggccgatgtttgcaatcggtgaactcattaacgtgatgcagcgcggcaatgcgtcattagaccgggtaaatgaaactctttcttatgaatcggatgtgacagatccaaaacagcccgctgatcttaaagagcctggagatatcgttttcagtcatgtcagctttacatatccaagctcaacaagtgacaatcttcaggatatttcatttacggtgcgaaaagggcagactgtcgggattgcaggtaaaaccgggagcggaaaaacgacaattattaagcagcttttgcgccagtatcctccaggtgaagggagcattacattttcaggcgtaccgattcagcaaatccctcttgaccgtctccgcggatggatcggatatgtgccgcaggatcatttactgttttcacggactgtaaaagaaaatattttatacggaaaacaggatgcaactgataaagaggttcagcaagccattgccgaagcacattttgaaaaagatttgcacatgcttccgtccggtctggagacaatggtcggtgaaaaaggcgtggcactgtcaggcgggcagaaacaaagaatttcgattgcgagagcactcatggcgaatccggaaatcttgatcctggatgattcgctttccgctgtagatgccaaaacagaggctgcaattatcaagaacatcagagaaaaccgcaaaggaaaaacgacatttattttgacgcaccgattatccgcggtagagcacgctgacctgatccttgtgatggacggcggcgtcattgctgagagtggcacgcatcaagaactgctggccaataatgggtggtaccgggaacaatatgaaagacagcagctgttcactgcggaagaagggggagcaggggcatgaaaataggaaaaacgttatggagatatgcacttctttatcgaaaattgctgatcacagccgtccttttgctagctgttgccgtcggtgcagaactgactgggccctttattggcaaaaaaatgatagacgaccatatcctcggcattgagaaaacatggtatgaagctgcggaaaaagataaaaatgccgttcagtttcacggcgtctcatatgtcagagaggaccgattgcaggagcctgtttcaaaagcaaaagaagcgcatatttatcaagtgggaatggcattctattttgttaatcaggctgtcagcttcgacgggaatagaacggtttctgacgggaagctgacgatcacaaacggagacaagagccgggcatatgctgccgaaaagctgactaagcaggaacttttccagttctatcagccggaaataaagggaatggtgtttctgatctgcctgtatgggggcttgcttgtgttttcggtattctttcaatacggacagcattatctgctgcagatgagcgccaatcggattattcaaaagatgaggcaggacgtgttttcgcacatacagaaaatgccgattcgctattttgacaaccttccggccggaaaagtcgttgcgcggattaccaatgatacggaggctatcagggatttatatgtcacagtgctttcaacatttgtaacaagcggaatctatatgttcgggatattcacggctttgtttctgcttgatgtgaagcttgcgtttgtatgtctggcaattgtgccgattatctggctgtggtcagtcatataccggagatatgcgtcatattacaaccaaaaaatccgctcgatcaacagtgacattaacgcaaaaatgaatgagtcaattcaaggcatgaccattattcaggctttccgccatcaaaaggaaacaatgagagaatttgaggaattaaatgaatcacatttttatttccaaaacaggatgctgaatttaaactccttaatgtcccataatttggtcaatgtcatccgcaatcttgcgttcgtctgtctgatctggcattttggcggtgcgagcctgaatgcggcggggattgtttctatcggtgtgctgtacgcgtttgtcgattatttgaaccggttatttcagccgatcacaggcatcgtcaatcagttttcaaagctggagcttgcaagggtctccgccgggcgtgtttttgaactgcttgaagaaaagaatacggaagaagcgggtgaaccggcgaaggagcgcgcgctggggcgggttgaatttcgtgatgtgtcatttgcgtatcaagaaggtgaagaggtattaaagcatatttcctttactgcgcaaaaaggcgaaaccgtagcgctcgtcggccataccggatcaggaaaaagctcgattttgaatcttctgtttcgtttttatgatgcgcaaaaaggtgatgtcttaattgatggaaaaagcatttacaacatgtcaagacaggaactcagatcccatatgggtattgtgcttcaggacccgtacttattctcgggcacaatcggatctaacgtaagtctggatgacgaaagaatgactgaagaagaaataaaaaatgcactgcggcaagtcggtgctgagcctcttcttaagaagcttccgaagggcattaatgagcccgtgattgaaaaaggcagcacgctatcctctggagagcggcagttaatttctttcgctagagctttggcgtttgatcccgcgatcttgattttagatgaggcaacggcgcatattgatacagagacagaggccgtgatccagaaggcgcttgatgtcgtcaaacaaggacgcaccaccttcgtcatcgctcaccggctttcaacaatcagaaatgctgatcagattttggttcttgataaaggagaaattgttgagagagggaaccacgaggaactgatggcattagaaggccaatattatcaaatgtatgaactgcaaaagggacagaaacattccattgcataacgctcaaaaacccaaaacaatcgtgttttgggtttttggtttatgtagtcaataagccagtccgacacggtttccgacatactcacctgtaacgagctcacgatataaaaagtccgcagtatcgccgaccgaaatgcttgtgccgccctcaggcaaaacgttacgctccgtacgataaacgccggttgctgttccgtccgggaggtaagtggggcagatgattgtccagtctaatgatgattctttaagcatttcgtatacttttgcatgctccttggctgcgcgggtctgctttcgtttcgattcatttgtttcaaaccggtattttcccggttcatatcgggaatctaggatccctgcggtgccgatcgtaataagccgtttgatatgctgttcctccataacggagagaatgtgtgccatagcagttgacaaggtatcatcaccatctgtgcctagacagctgatcacgatttcagcattctccattatttttttcacatcttctaagcggcgggcgttccccatgacggttctgtcttttgaaaggggaagatcagcatgttgagatctgatcagagcgaaaatatcaaatctttcatctgctgcagcttgtgttaaaaaggcttgtccgacgcggccgctggctcctaataaagcgattttcattaaaaaacctcctcgcctttcattataaaaggatgttctcagtttgaacagcgcgggaaagaatacctgtacaaataaacagaacgatgggaaacatattcatgaatcatggatacacttacgaattgaaccagctcccaattcacaatggtgatgaatgacaccccgattccctccctttttttctaggatatgtggagcaggaaaaaagggtgacaaaataaagagagcgcggaaaccgcgccctctatagccatatattgaattgttattgaactctgccgcccatttgctgctgagcgaaagatactaaacgttttgtgatttctcctccgacagaaccgttagcgcgagaagttgtgtccgctccaaggttaacgccgaattcagaagcgatttcaagtttcatttgatcgatagcctgagctgcgccaggaactagtaagtcatttgaagagttttggttagccatgtgtaaaatctcctttttatttagtatggttgggttaactggagttgcaccaatctgtgaacccttctcgggtgtcactgccgcctcggcgtaacccaatgctttgccggcttgttactacgtattatgttaaaatggccggaaaatcatgcggagaattgtgtggtaaatcttgagaaataaaaaaagcttagccgtttaggctaagctagtcataaatatgaaaaagcatcagttcatgtatctcgtttgtaagagcaggctcgtcagcgcgggcgggaaacaagtctccccattcaatctcaccgctcttatgatagatgccttcataatgggtccctttataataaaatgaaattttccatccgggcagcttttcttttgggaacaaaggtttccagctgaaatgagaaatcattacggccacgctccttacatttggtatcaattgacctaaataaaaacggcttatgttcattgtatcattgtttcagaacatcattgaagaggcctaaatatgcagtttgtcccagctttggataaagataagcccgctttattaaaaaagcggacaggttacgaaggccacaatgcttccggagatgtgattgccttctcagataaatatgacgcgtattcaaaacttcttcgttttgtaagagaatcaacatgatgcaaatttggatgagaaaaaatgcttcggcccgggcgcgaattcgcttcaaacatccatactttaccgttctgatcaatgccaaaatcgaaaccaatctccccgataaatccctcgatatgatcatgaaggacatggcttgcagtcagtgccgctgcagaaagctttttaatgacctcaactctttcagcgggatcatcgtatacttccgcaagtgtctttacagtgccgccgttagaaagatgtgttgtaatgctgttctttccggaaatttttacggcgattgctgtcactgtccattttccttttctgtttttattggtatggacacggaaatccgctggtttgccttgaaattcgatgagatcaacaccttgctgaatgagaaagtcggacgggttgtgatgtttttgaaattctgcaaggaatgaggcggcatcggaataatcaattgatgtaaaagttttggcgtcattcgtatgctttaccgtcaggccgccatctgttcttgtcagctgataaatgccggtgccgagtgctccatttgccggtttgatatagacttttttgtatgcgccacagagctcatcaatcagctccacagacggtgtcagctcggatctaggcaaaaagggtgccgttctcggatctttttcgagcaattgatgaacgttccatttattgaaaaacgttttattaaaccatgggatctgatattcatcgatcagcctcttttttgtatgttgcaagagaagtgaatcttcaatttttcggttcggcaaacggtcataaacgacgttcggcaatggaacgatttttttctcccagccgttttccctgtaaaggaggccttcaatcgtgccttcctcccaattgatttggtgcgcgccaaaaacgaagcagtagcccccggcttgctcgtgtaacgtgacaagtttagaaaaaaagagggaacgatccttaaatggacgttcaagagatacagtaaaccctgccgtaaagatgccgactaacggcccgatatgcactgtatgatcatgaatcagtatatcagccctgcttcggtggggaagcaaaagctcatgaaacagattttcagagagaagcacggtttgttccagatgccgtctgtaagcaacgtggcatctgacaaccttcgttccgaatgcggcatgcaaaagtccgtctcgcttcagcgaagagggcagaaacagggtattttcactggttttgtctatgccgatcaaaaaccgtttaggattcacgcggaagaactcctttctggctttgctcagaaaacagatattggcagcgctttaggggacaagtgtacagctgttctttttgctcgggagagacacgcaggattgactttctgcctggtttggaattgatatctaaaatccaaattctcccgtccttagcaagacatatatcaagaccgagttcaaacaacggcccatagcgctcgtcaagataatacggaaccgattgggtaatcgaaaacacatcatctagtaagaccacttgctgttttttcggtatatcttcaaaccaggagtcaaatgtcagcgcatcagatccgcctgacaaattggccagcagcccgtgtttgtatccgcgtcttactgcctttccgactgtattccattcacctgcttcgtttttttccataaacaggcgaatatcacaagggtattgttccttatcttgaatgtttaagtaaggctgaagcaaatattgatgctgaagcacttttttgcaccatgttttaaaagaagtctggttggaaaacgtttttgtctgcttatcctttccgatgtgataagtagcagtgatgtttttcttgcccagcttcaaaagaatcacgcctctgcctcccgcgccaaatgccggtttaaggatgcaggctttttctttggataaaaaggagtgaatttgttcgtagcggctcacctttatcgtttcgggaatatagggattgattacagagtgctgctgcaaatcgtgaaggacggtccacttatcgggaagaccccgcccgataaattccgttttcggatattttttgagccactcaacgattggttttgctttttgggaatgtgaatccttgccgtaaaaacagcgatcataaatataatctggaatcgccatttcagtttcgttccatgtgctgctggccgaatgatagaccgatgctttgacacgcaaagtgtcaggtgaaatatcaaatggtgtaaaccggatgaaacgtatgccgaattcgggtgctcttttggccagttctgcggaataatccgcttcatgctggcgggataaggacataaaaccgagtgttatcatggtgagactcccccttttattcaaaagctgccggcgggtgtccgcagctttacactaaatacatgtaagacgaacgcagctgacggtattctactttacagaatacgattctccaccttgccctattccaaaagaacaagctgattttctaagaacaggaatttgtctcctcgtttgctaagtgattgcatgagcctctataatacgtataggtacataatctatatgaaaaaagctgaagcacagatggaggaagatgaataggaatgggtattgcaggaacctttatttttatgatcgtgatcggcgctgccattggagcggtgaccaatcatttagcaattcaaatgctgtttaggccgtataaagcgtactatttgtttgggaaacgagttccttttacgcccgggctgattccaagacggcgagatgaacttgcaaaacaaatgggactgatggtagtcaatcatctcttaacccctgaaggcattaaaaagcggctcgtctctgatgcagccaaaacgcaggctcttcgagtgggggaacagctgattcaaaagctgtcactttctgaagtgacagtaaaagaagcgcttgaaaaagccgggatgaagcgcccagaaaaagctgctgatgcatggatcagcagctggaccgatgataagctgaatgagcttttccgccaatacggggaccaatcgttaaaagagctggtgcctatagaggtgcaggaaaagcttgaggaaaaaattccgatgatttcaggatatatattgtcacggagtgtcagttattttgaaagtgatgaaggaaaaatccgtcttggcaatatgattgatgactttttaaaagagcgcggcatgcttggaagcatggtgcaaatgtttcttggcaattcaagccttgcggatcgcgtgctgccggagctgctgaaattcttgcgcaatgaggaaacaaataaattgctttctgatctcttaaaaaacgaatggggcaagctgagggagtatacgtttaatgaagcagatgaaaaatggaatgcaaaggcgctcattttcagtttgaaacgaagagtgctgcaagcattttcgactgcccctttcttcgacaatacgattggcacgcttaccgtccgctatgaatctgagctgacccagcaaatgctgccggcactgttagacaaattgcttgaagggatttcgtccaaccttgaaagtgtcttaaaacggttgcgtcttgaggaaatcgtcaaggagcaggtggatcagttcccggtggagcgtcttgaagaaatggtgctgtccatttcaaaaaaagaatttaaaatgattacctatttgggggccttctcggcggaattataggcgcgattcaagcattgtttgtcatccttttttaagaagaaatggtttttgattaatgaaaggagctccatagtctgttatagtggagtggtatgtcaaacggcaatgatgaaaggagctatttacaatggctgttaatttttatgatgtagcgtatgatctggaaaatgcattacgcgggagcgaagagttcacccgtttaaaaaacctttacgacgaagttaacgcagatgaatcagcgaagcgcatgttcgaaaacttccgtgatgtacagcttagactccagcaaaaacaaatggcaggagaagagattacacaagaagaagtgacgcaggctcaaaaaacagttgcgcttgtacagcagcacgaaaaaatttctcagctgatggaagcggagcagcgcatgagcatgctgattggtgaattgaacaaaatcattatgaagcctttagaagagctttacggcagtgttgaaggctaataagcaaaatcccttcttggataagaagggattttttattcattcagcaaacttggaaatccaatgaatcttttacctctccattgatgatcactgataatgtatgaattcctttgtaatgctttctggtggttaaatccttaaaggattggtttcttgtgtatgacttcgtttcgttttttcgtatagttgtttctgttattttaaatactttctgatgacgctggcctcttgcttttacaaaatcaattgcgtactcaattcttactttttgatccctgtctgaatgaatatagaaagaaaattcaaggctttcgccaataactatacgtttgggctggcctgttaaatcatgtagttgtatcgaatcagcattttcataaccaaaaagcgctaaggcctgtttatcacccttttttaataaggtccgataggcgtgtttgataatccagtctgtatggggatgtgttccgtaccattgatctgcgacttttctcagtaaatgaggatgcgtttttgatatatcattaaggttgttggccacgctttttcttacatataaggactcgtcctgcatcagcttctcaaggatcggcaatacgggggaagggtccgatttcaaagccggtatcgattttccccatggcaggcggggcctgctgccttcgctcgcaagtcttctcacgtgttcatttttatgctcagaccatgcaagcaattgtgcaaccatcttttcttgatctaacagcaaaaaaggccttacagcaaattctgaggtcgaatattgcgtaaagtattccaatgcctttattgattcttcccaatgcgctaacccgtactgttccacataatctggaaataaaattccgctgagtcctttaaaatgaggggctgtatcccgtaaaattgtgagcgcttcaacgtattgttttggcaaagtttcgtataaagaaactgtcacgcggcgcatccgctcttttaaagtgagttcaggccagtcctccagccgtaatgtatcctcgaatctgtctttgttaaaatcaggataggatgaccttacatgatggatcaactgagatatcagttcttcattatatatttcttttaaatcagccatataaacaccgctttttcgtttattatttatattgtatgggaatgtacgttctggatcaagtgtatagtcctaaaaattaacaactgatcctaccacggatatacaaaagttggttactttttttagttaaaaaaacccttgtcatcggaaaagaaaactgagataataacattgaaagcgcctacacttacctatttcaaatggatacggtcgcatatcatgccgttatatagaggggataagcaacagagagtaagtgttcggagcgcatcattggtcaaacaaggggttcctgatacatgatttttcgtaaatcgaaataacgatattagggagaatggctgcttcgatcgtatcctatcaacaagccatacataaagtctgctgagccaggctttttttgctttaagaaaaggttgttctaaacacagagacagggtcatatcctatacacaagtacagtcatcaaggagggggacatctctgtgtcaaaacaattgcttgccttaaatatagatggagcgctgcttcggtcgaacgggaagattcatcaggcaacgaaagacgcgattgaatatgtaaagaaaaaagggatttacgtcacacttgtgaccaaccgtcattttcgctcagcacagaaaatagcgaaatcgctaaagcttgatgccaagctgatcacccatagcggggcatatatcgctgagaaaattgacgccccgttttttgaaaaaagaatttctgatgatcatacctttaacattgttcaagtgctggagagctatcaatgtaatattcggcttcttcacgaaaagtattccatcggaaacaagaaaaaggtgaattcgaatttattggggaaagcactcattcatccgtctgacccgatcttttatccagtccagttcgttgaatcattaagcgatctcctcatggatgagccggtgagtgcacccgtcatcgaggtgtacacggagcacgacattcagcatgacattacagaaacgattacaaaagccttccctgcagtggatgtgattcgcgtaaacgatgagaagctgaatatcgtcccgaaaggtgtctcgaaggaagcgggtttggccctcgtcgcttcagagctgggcctgagtatggatgatgtcgtggccattgggcatcagtatgacgatctgccgatgatcgaacttgccggtcttggggtagcgatggggaatgccgttccggaaattaagagaaaggcagattgggttacaaggtccaatgacgagcaaggtgtcgcttatatgatgaaggaatatttccgaatgcagcagcgaaaaggatttcttgataagttccacatgaaacgtgtgtaaaaaagccgctcgcaccctgacaggtgcggcggcttttttgccggattgattttagcagtttatttctgtacactaaagaaagttttgaatctgataaattaggtgatgaagttgcaaattaaaatagaaggcatacatgatgaccgcctgcatcggcctctgcaaaatattgcaaatttgttttatgaagagtgcgagcttgcgtatggcggagaggagcccgcagattttgtcatttctttagcgttgtcacaaacggatgagcatgtgacggtttcgggagaagtgaagggaactggcataaaggaacagcatacaaaattcttttctcccggcatgaatgaaaaagaagcttttaagcaagtgaaaaacacaatttcttatgtgtatctcaatcttcttcaggcgcatacgggcattacgcagaagtggggaatcctcacaggaatccggcccacaaagctgcttcataaaaaactgcaaagcggaatgtccaaggagcaagcgcatgctgagttgaaaaaagactatttaattcatgatgaaaaaatcatgctaatgcaggaaattgttgaccgtcagctggcggcagttccggatttgtaccgagtaaaggatgaagtcagcatttatatcggcattccgttctgcccgacaaaatgcgcgtattgcacattccctgcgtacgctatccaaggacaggcgggcagagtcggctcattcctatggggactgcattacgaaatgcagaaaatcggtgaatggctgaaggagcatgatgttaaggttacaaccatttactttggcggcgggacgccgacaagcattacagcggaggagatggatctgctgtatgaagaaatggtccgctccttcccggatgtgaaaaacattcgtgagattacggtggaggccggtcgtcctgacacgattacagaagaaaaactcgccgttttaaacaaatatgacattgatcggatcagcatcaatccgcaatcctacgaaaacgaaacgctaaaggcgatcgggcggcaccatacggttgaagagaccattgagaaatatcatctgtcacgccagcatggcatgaataatatcaacatggacttgattattggtttgcctggggaaggcgtgaaggagttcaggcacagtctttcagaaacagaaaaactgatgccggaatcccttaccgttcatactctttcatttaaacgggcgtcagaaatgacgagaaacaagcataagtacaaagttgccggcagggaagaggtttctcaaatgatggaagacgcggtagcctggacgaaagagcatgggtacgtgccttattatttataccgccagaaaaacattcttggaaaccttgaaaacgtcggatactctttgccgggacaagaaagcatctacaacattatgattatggaagaggtgcagacgattattggcatcggctgcggcgctgctagtaaatttattgatcgggatacagggaaaattacgcattttgcgaatccgaaagatccgaaatcgtacaatgagcgcttcgagcactacacggacgaaaaaatcaaatatttagagcagatttttgaaaaaacgacaaagcagcactgatcacagtgctgctttttttatccctgtttttttgcgggctgaacctcaggcttccatttaaataccttgttaagcaagcggtaaattcgttttgattcctttgtgacaagcggtcccaaaatcgccagaatgaggacatataatgcggcaaacggctttaatgtggccgacagtccgccggctatcccgagattcgcaacgataatcgaaaattctccccgcgatacgatcgtcagcccgatattcgatgaagccttatgagaaagccctgcgcgtcgtcctgccaccattccggcgataaaatttcccagaatggtcaaaatcactgcacccaacgcaagccaaaccgcttcacctagcgaaaacggatcgatactgaggccgaagctgaaaaagaacatcgcaccgaagaagtcgcgaaacggaacaacgaggtgttcaatcctatcggaatgctctgtttctgaaaagaccaaaccgagcagcagcgcgccgattgcttctgctacatgaatcgtctcggaaaacccggcgataaaaaagagcgctgcgaaaatgacgataataaacacttcgtttgagcgaatgtccaacagtttgttcaacagcggcgggagttttcttgctgcgataaaaaacagcagcatataaccgaaggcgatcaaaatggacaagagtgcactccctacggatgtcgcatcacctagtataaggccggaaacaacggacagatatacggcaaggaaaatatcttcaaacatgatgatgccgagaatcaattcggtttccggattggcggttctttttaaatcaacgagcacttttgcgacaatcgcacttgacgagattgtgatgacgcctgcgaggatgaggacttccagaaaggaaaatccggtgataaacccgtaaagcagtccgaggctgaagttaatcaaaatataaatcgtcccgccgaccgcgattgattttcctgatttgattaacttcccgacagagaattcgagtccgagatagaagaggaggaacagtacgcccattcgcccgaaaaactcgatgatttcactgctttgaataaatgttagatcaataatccccattttcggcgcgtgcggtccaacaagcattcccagcacaatcagaaacggaataatcgaaaatttaattttattggcgatcacactggcgattgccacaagcacaagtgcagttccgacttcaaatacaagatggtccatcggggctcacacgccctctccagaaagaaaatcgtgaatcagtttcttcagatgctttctctcacctgagaggacaagggtgtcattttcttcaataatcgaatccgctccgggatttaggagcttttcctggttgtgtttgataatcgcaataacagtgacatcgtaattctggcgaacatcaagctcaccgagtgtgcgtccgatcgatttggcgcctttttcgaccttaaaccattcaataataagatcgctgaaggccatttcgatggactccagagcttgcggtttatagaccatgcccccgagaatagctgcaatttgccttgcttcagaatcatccaatgaaatatttgaaagaagctcatccgggtcccggtcattaaaccggtaaatttcccttcttccgtcatcatgaatgataatcgtcattttttcgtggcttcttgtttcgatttcaaactttttgccgatgcccggcagatcgttttctttaatattcaatgaaaatccctccgaatgtagtgttggcagtatggggtgagttacaaataaaacttgagcaaattatattcggaggtaattagactggtatttgacagggacggcacaagccttttccagcctgtttatcagcggttcgtcaagtggtttgacagagagatgcctgacagactgtgccagcgggctgtactctttgatcagctcagccgggtgaatgctgcccggcgacggcgtttttgccgattgtgtttcctgcggatatgaggacataggcacatagctgtcagtgcttgcttcaaactgggaaggcagaaccacgtccgaagggggaaagtacaccataaataaacttaacagaaaactgatcagcaatttatccatgtcctttcctcccttctcatcaagatatcccttctttttcactatataaaactttatgtttccattcaaacaatatgcatttttcagtatctattgaccttgaaaaataaaaaggtttatttggggatggcggggaatgtataggagaaagaaaaaagtaagcgcatacatggaggtgcttttaatggagtttgttcaatatgcatgtaatggggccgttgcagagattatcctgaatcggcctgatgcccatcacgccctgaatgaacagatgctgtctgaattgaaggaggcagtcgaaatggcggctgcaagcgaggcgctcatcgttctcctgagaggaagcgggaaaggcttttcggccggcggtgatatcaggatgatgacgtcagagcatgaccctgaccaatttaaacggctgatggatacgattgaggctgtcaccctgaatttatatcagatgaagaaagtgacaattgcagccattcatggtgctgctgcgggactgggcctgagtttggcgctttgtacggacattgtgctcgctgaaaaaaacgccgttctcgcgatgaattttatcggcattgggcttgttccggacggcggaggacattatttgctgaagaaaagaatcggtgaagcaaaagcgaaaaaactgatttggagcggaaaaaaactatctgcctcggaagctgccgatatggggcttcttgatgggacatttgccggagaccctgccgaaggcgcaagacccattatcgaaaccctgttggcctcccctcttttggcgatgatcgaaacgaaaggtatttttcaaagcctccaaattgaagaactgaaaaaagtgctatcccttgagcgcagcgcccaagagagaatgagaaggaccaaggatcaccaagaaggaatccgtgcctttttagaaaaacgggagccgaagtttcaagcgtaacagatcagccggaaagctgatcatctgtgaaacaaaatcagctttccggctgcattgactaaacgatgagtatgactatgaagctctttttcttttaagagggcttcaccatgcgtttttgccgcttcttcatgttctgcctcgaattgctcgtttaccagcgtgttccccgaaggatcaaatacggtaaggaaataatcagccatcaggtttctcctccattttaaggtttatcagtctttcttcatttatattctaaaaaggaaatcaaaatcctttattatgctttatccaaaattagtatataatgggtcagggaaggaggagattcagtgcttacaattgatcacgtaacgaagacatttggagattataaagccgttgacggattggacttagatattccggaacagcaaatgttcggtctattaggcgcaaacggagcgggaaaaacaacaacgtttcgcatgatcctaggattattaagcattacggagggctcaatcagctggaagggccgtcctgtgaattatcatatcagcaacaaaatcggttatttgccggaagagcggggcctttatccgaaaatgaaggtaagggatcagctcgtctatcttgccagattaaaagggatggagaagcgagaggctgtaaaagagctcgggacatggcttgaacgcttcaatattacagattacgagaataagaaggtggaagagctttcgaaggggaatcagcagaaaatccaattcatttcggcagttttgcataagccggagctcctgattcttgatgaaccattcagcggcttggaccctgtcaatgttgagctgctaaaagaggccgtgatctcgctgaaaaacagcggtgtttctattttattttcaagccatcggatggaacatgtggaggagctttgtgagaacctttgcatattgcagaaaggaaaaccggttgtacaaggcaagctgaaggagatcaagcgttctttcggtaaaaagaatgttaccattcactccgatgacgatctgcgctttttgcagtcccatgaaggcattcttcaatggaaggaaacggcagacggcgtcaagctgcagattgccaatgaagacatttctcaagagatttttgcgatgctacagggaaaagggtttatcagaaagtttgagcttgaagagccgtcactgcatgatatttttatagaaaaggtgggggccgtctatgaataaattttggatcatgctttctcatacatacaaaaataagattatggcaaaatcctttattatttcgactgtcatcacggtgctgcttgttttagttgtaacgaatctggagtcgatcatttctttgtttcaaggtgacgatgcgaaagaaaaaatcgccgttgttgatgaaacaaacgaattatatccggttttttcaaagcagctgaaagcggtggatactgacggcgatcttgatgtgaaactgtcgaagcaatcggaggatgaggtcacaaagcaagtcaaagatgaatcactcgatggcatgctcatcatcaaacgagatgaaaaagggaccatttcaggaacatataaagcgttaacgatttctgatgaaagcacgtatcaaacactgcagcaggcgctgacgcaaaccaaaacagctgtcggaacagcggagctcggcgtgtcgcaggaaacgatcagcagcctttatgcgcctgttactgtggggcagaaggcgctgaaagaaggggcaaagtctgaggaagagcttggccagacggtagggcttgtttacattatgctgttcgtcatttatttctcggtgattatgtatgccagcatgatagcgatggaggtcgcaaccgaaaaatcttcgcgagttatggaaatcctgatctcaagtatgccgccgatccagcaaatgtttgcaaagctgcttggtatcgggcttgtcgggatcacacagcttgctattattataggagccggctctctgtcgcttaagctgaaccaaaagagcgaaacggcttcatctgtcggcggattccttaatttgaccaacgtatctgcaaccactgtcatctatgctgtcattttctttttgctcggatactttttgtacgcgacacttgccgcgtttcttggcagtgtcgtcagcagaatagaggacgtgcagcaaacgatcacgccgatgacgcttttggttgtcgccggttttatgatcgcgatgttcggtttgaatgcgcctgacgcaggatttattacggtaacttcgtttattccgttctttacgccaatgattatgttcctgcgcgtcggcatgcttgatattccgttctggcaggcggctgtcggaatcggaatcacactgctcaccattgtcatactggccgttatcggcgccagaatttataaaggcggtgtattaatttacggcaattcaagcgcgttcaaagcgatcaaacaagcgctacgtttagcgaaaaactgattggaaaacagcctggggattctcaggctgtttcttttttgacagaacgtgcattcgcaagaattcggtgctaaaataagggtacttcatcctggaaaggagcagaatgttgactgatctaacctttattcatgcggcagatcttcatcttgacagcccgttttacgggatatcgcacctgccggagccgatttttgcccggattaaagaaagcacgtttgcaagcgtgagacatatgatagacgccgcagtgagagagcacgttgatttcattttgctggcgggagatctgtttgatgaagccaatcgaagcttaaaggctcagctctttttgaaaaaacagtttgaaagactcagagagtgcggaatttcggtatatgtcatctttgggaatcacgatcatcttggcggggagtggacgccgattgaatggcctgagaatgtccatattttttcgtccgctgttccagaagaaaaatcatttttaaaagaaggcaggcgcatagcaagcatttacggcttcagctatcaagctagagcagtgacggaaaaccaagccgcccgctatcggagatcaactgacgcaccgtttcatatcggcatgctccacggcacgctctcaggatctgaaggacacgatccgtattgcccgtttacccatgacgatctcgtgaaaagcgggatggattattgggcgcttggccatatacataaacgccaggttctatctgcagagcatccggcagtcatttacccgggaaacacgcaagcacgccatatgaaggagacgggagataaaggctattatctcgttcatgtgacaaacggagatatatcttatgaatttcagagagcgcatgatgtcctgtgggaaaaagcggcggttgatgtgacggaggcaaataatatgaccgctctcttccaaatggtggaggacacgttttcgaagctgcggaaaaaggggagccctgtttgtgtaaggcttgttttacaagggacggcgccggaatggctgctggaggcgccaaaaggcaccttggatgagtttcttgaagctcttcaggaacaagaagcggaagaggaacatttcgtttggcctcttggattggacgatgagacagaaaacgaagcaaacctaacaaaccttgatcctttttttggcggtttatttgaagacattgatcgcagcgatctgtcagacgtgctggaagggcttgagcggcatccagtgtatagaaggcacgcggaccggtttagccaagaggaggtaaaggaaataaaagagcaggcacagatattattgaaaagacagcttaaggtgcttgatacatgaggcggtgacagctttgcgaattatatctttacatatctaccaatacggaaaattttccaatcggacctttgacttttccgcctctcctgtccaagtcatctacggattaaatgaggcaggaaaaacgacgatgatgtcattcattgaaagcatgctgttcggttttccgaaaacgaaaaagtatgaaccgaaaacaggcggtgtctacggcggtgttcttgaagctgaacatcctgagtatggggtgctgaagatcgaacggacgaaagggactgccgaaaaactaagcgtgtacacagaaaagggcgaagtaaagcagggagatgttttaaagcagctgttccagggcacagacaggtcgttgtacaaagccatatattcgttcgacgtattcgggctgcaggaaattcacgcctttaatcgggacaagataggggaatttttgctcttttccagcttgtttggtgctgaagccgtatcaaagcttgattcaaggctgacgaaggaaagcgaaaggctctataaaccaaatgggcgaaaccctcaattgaatcaggagctggaaacgcttaagcagctggcagttaagctaaaacaggctgaagcagaggaagcgggctatcatcagcttctcgaggaaaaacgaacgcttgaagcccgccttgcagccgcggaaaccgaattgaaagagacggcgggacatatccgaatgattgagggagcgattgagcgaaagccgctgctaaatgaaaaagcgacactcgaacaggtgattgcagaatttccggaacacgcaggacaatttcctgctgacggactgcatcagctggaaaaatatgaatcccatcttcacccgaaatcagcacagcttgaggcgcttcgggtgaagatggcggagttggacaaacagaggcaaaagcttatccccgataaagaactattggcgaaagaaacgctgatacaagagctttcggcagcgtttcatatgtaccaatcctggggagaacagctggcagccattcaggcacagctgcgccagacgtctgcgcagacagcggcagggctggaacagctcaataaaacggatgaaaatgagctcctgaatatgaacacctcatatgattatgaatggcagcttcagcaagcggtgcagcaatatgtacaggcaagagacagaaaacggcagcttgacgagacgtttgaacttgcccggcaagagctggaagacgcggaaaaggccgttcgtgccgcttcgtccgcgattcttgaaaacagccaaagaaaagataaagaagcagctcttagagcatatgatgaaacacaggggcagcaccaagagcaagcgaagctcagagaacagctaacgttttttgaaagacagcaggctaaacagaaaaagactgtcattgcagctggtatgttgttcatcgttctcttttctctgctgcagcaatggattcccgccataagtttcggcgctgcacttattgtgtattggcttgtttcaggaaagtcgtcttctcgaaacagccgagagacaagacagcccatgacggatatttcaccagcagaagctgaaatgcttagagaagcgttatgggaggatgaccgcaataagcagcaccttctcacacagcgtgcagcgctccagcaaaaagaggcggcgtatgaaagggtcatccagcagtttgaacagtgggaagccgaaatggcgccgtcctttacacaggttgagcgttttatgaatgagctcggatttaaggaagatccatcatttttgcttgatgcatacagcttaatgaaggatgttaaaaaagaagtgaagaaaaagcatgagctgaccatagaagcaggcaggctgaaaaagcaccggagaacattcgaagaacgcgtcagtatgcttcttcccgtgaatcagagtcaggatatctccatttcggacgcccttcacacattgcggaaaaacattgaacgtgaaaaagaaattgagaagcaaaaaaaggaaattgaaacagatattcattatacaaaggaacagatgcttgaacttgagcaagaaatacagtatttccacgcacagattgaacagttatttgccgcggctgctgcaaaagacagagatgcgttttttgccatagccgacatcagcaggcaattgaagggtacggagaacaagcttcatcacgtaaacgcacagcttcaaggcgggtacccggaggaacttgaactggcggattccaatacgctttctgaattgaaagataagcaatttgttgagaatgaaagaaaagagcggctgactgaggagatcgagcagctccgcagccaaatcgcactgctctcagtcaaacaggaacaattagaggcttcgggaatggtctcagacctcaagcttcaaaccgaaatgcaaaaagaacgtgtgaaagaaacggctaaaaaatgggcctccatacaaatggtcagacaggtgatcagaaacaaattggagcggcataaaaaaatcgagcttccgcgccttctagagacggcaggagaatttttccgccctctgactgacggaaactaccaaaccatttatttttccgaaacggatgattcgatcatggttatgcatcgcgatggaactgtctatcatgcggaagagctgtcacaagggacatgtgaacagctgtatacagcgatccgatttgctttggccgttacgcgccagggtgggtcaaagcttccgttccagcttgacgacagttttgttcattttgatcaggaaaggctgaaacgtgtattacatgttctgtatgatttatctgaaggcggtaggcagattttgtattttacatgccatgagcacgtaaaagatgcatttcatagcagccaaatcatccatttggtgtcataaaagaggttctatagctgaaaatcggtatgtgatatactggtattatgtaagatacggagggagctttaatagaatggctaaagggattatgctacatgaggttggcgaacaggtggaccagtatctattgattaaatcctcgacgaaagggattgcaagcaatggaaaaccgtttttgacgctgatgctgcaagaccagtcaggcgatattgaagcgaagctgtgggatgccaagcaaagtgatgaagtgacctatgcgccacagacgattgtcaaggtcgtcggcgatgttcaccattatcgcggacgcacccagctgaagctgagaaatatcagaccggtaagcgagcaagaaaacgtcaatattgatgattttttagaaaccgcgccgattccgaaaaatgaaatgatggacaccatcactcaatatatatttgaaatgaaaaatccgaatatccagcgaatcacaaggtttttggttaaaaaacacgaagctgagtttatggattatccggcggctacgaaaaaccaccatgagtttgtctcaggtttggcgtatcatgttgtctctatgctgaacctggcgaaagcaatagcagatttatatccgtctcttgatcgtgatctgctttacgccggtgttatcctgcatgatcttggaaaagtgaaggagctgtccggccctgtttccacttcgtacacggttgaaggcaatttgctcggccatatttcaatcatggtgacagagctttcaaaagcggctgaggagcttcaaatcgattctgaagaggtgttaattcttcagcatttgattttgagtcaccatggcaaagcagaatggggcagcccgaaaccgccgatggtgaaagaagcggaaattcttcactatatagacaatctggatgcaaaaatgaatatgatggacagagcgcttgagcgcgtgaagcctggcgagtatactgaacgtgtatttgcactggaaaaccgttccttttataaaccgacatttcataaataacttaaaaaggactgatgctgacatattcagctcagttctttttgatgcgtctttcccgcacataactcgtctcattcccgcatatggttaagaataaagaatctatgcaaagggggaggagcccgtgttattttttccgtggtgggtgtatctttgtattgtaggcattattttcagcgcatataaacttgtgacggcagccaaagaggaagaaaaagtagaccaggcttttattgaaaaagaagggcagatttatatggagaggatggaaaaggagcgagaacgccgcagttctcagcagcatgaagaagaaaatcaaaaccattccatcgcataaaaaaagctgtgcggctcaatgagcctgcacagcttttttattatttagaattgcttgaagatgaagaagtgctgttacttgttgaagatgtattaaatgtgtctttcagatctttatcttttacttcgatgtcagccttcttcatgactttttgaacagcttcctgaacggcattgctgtcatttagtttttgttcaagcacttcagatttcagttcttttttcatatcttcatattttccgcgttcttcagtctttttgatgatatggtagccaaattgtgttttcacaggattgctgacttcatttgttttcaacttgaatgcagcttttctgaatgtggaatccagttgttcgttatcttttgaaatccagccaagttcgccaccgtttgtagcagtggagtctgttgagtattctttcgcaagatcttcaaacttttcgccttttttcagctttttctctacttcttcagctgtctttttatcagcgacaacgatatggcttgcgcgaatctggccttttaagccttcccagtattctttaatttcatcatctgtaactttgatgttatctttagccgctttttgtgtcagcaattcatattttacttgttctttcaggtaatctttgccatattgcttttcgagggcagtatattgatcgccaagctgcgttttatattctttcagcttgttgtcaatttctttatccgaaactttatacttcttgtccaatactttttcttgcactagctgtgtcagtacgcttgcgccagctgttttcttcatgtttgtgtaaagctcgccttttgtgacatcgcctgcgtctgtttttgcgataacttctttgtcgccgctgctgcaagcactgagagcgaggatgcttgtagcagtgatagctgctattgcgattttcttcattgttttcaaacactcctaatcattccaaattaaattacctatgcgtatcataacatattgtggctttctgtaaaaagattttaaataaagggcattcgtctagtcaaacttttgctgatgacatacttatatattgatcaagaaaaggaggtatgtaacatgagcggaggatactctaacggattcgcgttgctcgtagtactgttcattttgcttatcatcgtaggtgcagcttacatctactaagcagcccgaggatcgcttgcaacataagcgatcctttattttcactagcgcctaatcgtttcaaacatgaattgcataacatgtaattggtaaataaagcttattacaggaggtgctttttaagatgggtgaagtatttgcaggcggattcgctttattggttgtgttatttattttattgattatcatcggcgcttcttggctgtactaatcaacataaaaaagcatagctgcttaatcagcagctatgctttctttcgtatttacactgtaaaggagatctccacaaacgaagagatcagtaaaattaatatagatacattaataaatcggaataccttatcttgccgctcttcaggaatctctctgacaaggcataatgtattggtgagcctgtttatgaaatataaaataaacacggcagccacgataaaatagaataaaatgatgggagattccccctctctctgaactgtcccatattacattaccaaatatttattaaaaaagatagaatgcaaattgaaaaatcgccaccagcaccagggtttgactacttttcaacaagaatatccaagccgtcagcttcctgatcaataaaagcggttttcggtgcttttatcagcttgagagccagcaggaaatcaggcagacagtagccggcgtgaatgcccgagatcatgcagaaataatgagcgtgattcggaaatgccagtgctgcgtaaaacaataccggtgtaatcagcaagaacgggctgacgagtgaaatcagcattgttgtttttggtatacgtttccatgtgcgcatgcgcaatatggaaaactttttttctatttttctttttttgcagatgattggcaggacatggatgactttatgtgcaaataaaataacgacgagcaaaccgccgaataaagatacatattcatcgcttaagcttgtgccaggccgcagcagctcaaaagctaaaaaggtagatataaaaaccaaaatcataaaacatacagcagttaatattatgcgaacggcgccataatccttcatgagatttatggtcttccagcaattcatcaaagtcatccttccatacatcttgaatagaatctcaaaataatttactcctcccaagagaaaaaatcaatgcttttttaagaaaaaatatcatccggcaggtatttttttgaaacaagcaaacaaactgcgaaatatggggttagaactttcttctcagtgaattatcagctaaaataagattaaagatagaaagaagtggtgtggatggattcgatggatcatcgcattgagcgattagaatattacatacaattattagtgaaaacagtagatatggacaggtaccccttctatgcgcttctcattgataaagggctgagcaaggaagaaggggaagcggttatgaggatatgcgacgaattgtcggaagagctggcaacacaaaaagcgcaaggatttgtaacctttgataagctccttgcgctttttgccggacagctgaatgaaaaattagatgttcatgaaacgatttttgccctgtatgagcaggggctttatcaagagctgatggaagtctttatcgacatcatgaagcattttgattaactgtttacaggttcaagctcttcagccggttcatccgccgcactgtcctttgcttttttcttcagttttccgtttacgctttcaaagtcattgtcaatattggtgagtgacgtttcgaaaatttccataaaatcatcgccgtagatatggcgtatcatacacatcatttctgccacttcaggaaattttccgaataaatgatacaaaggctgtgaccctttaaaaacagcgttgcgtgtcggatcaaattcctcaagcaagctccagaatacctcggtaccttcctcagtcaattggacatatgtgttccgtttatcattcagccgtttggagaaccttaaatatccccgttcttccagcttttttgaaaagttgaatgcggttgatacgtgcatgaccccgaacttcgcgatttcagaaatggaagctccattcaattgatacgcaatccataaaatatgatgctcattaatattcaggtcatacggtttgagccattgctgccaatccttctcgatcgatttccaaagagctttgctaagctgagccattttctgggtgaaaaccagagcttctttcacatcatagggcggttccactcgattcattacgtcacctgcttctctttttctttttctctattatgccaataaaataaagattaataaagatgaaaatgtaagaattttttaataaattcacaaaccattgcgacgaaagggtttttcggccaaaaaaaaatacgggtccaattttggcccgcatttttttcttttgaataggatattagttttgtaaggttttctccagctgtctgattttctcttcgatatcggcaatttctttttgcagatcctgctggtgaggcttgatctcttcctgccattttttaattgacgtttggagctcgccgcccacgtctttaataacatccgtgctttcttttgccgctttgatcagctggtcttttaatgcaagcccgtctgactttaagcgtttgattgtttcttcaaaagaatcataattggttttcattttttcacgcagctgctttcctgaggaaggtgcagtaagaagaaccgctgctcctccgatgatgccgcctacgaatagtcctgttaatagagaacgtccgctcgccattacaatcaccccgtctttttcttcaaaataggattcattcagcatttttcatttttgttgaaagcctgaacttctatacatagcttgctttattttagcatattttttaagtgaaaaggagggagaaggttgtctgtctttttgattgtattatcctgcatcacccttgccttcgcttcaggcgctgtttactatatcaaacttctcagccaggctgcttcttatccgcccaagagggttatccggcagaaagcgcttgtttgttcaaccggaaccgcctttacactatgtcttatctttttcacaaaactcctcgcttaaaacatgctgacatgctgcgggcgctctgttcaaaaaaacctctcccggaagcggaagaggttttgtgtgacaattatttagcagcttccataaagcttgaacgccttaaaatggtttgcacaatcggataaataatgatcattgagattgtattcagcacagcggccggcagaacaacagccgcgaacaatgcggcgaaaccgcccggtaaaccgacgatcaataaagctgacgatagaaacacaattcctgataagatggtcccgatcactgtcagcacagcggctgcacctgttttccggctctttctgaacaagagaaacagggagaagaacagaaacgctgatacgggtttatcaatgatgttagggatctgtccggctggaaacgcggttgtaagcgcggaaatgattccggtcacgatcccgatgacgagtacattttgcacccgcgggaacagcagaatgcccatgaacatcatgatcagcatcatatctggtttcatgccgcctaaaaagggcggaataatggaatgaagcgctgcgccgatagcggcaaacagagccataatgactaactcttttgttttcatatctatgctctcctctgctaagcttttgccctccaataatatgctcatcatttattgcgaaggctttacagaatgtgttatgcaaacagtataccaaacgaacggtttgcatagccagactttttactcattttcctgctggaatttcttcatgaacgcagctaatttttcacagtcttcgagagagaccgcgttataaatagaagcgcggcagcctcccaccgaacggtgtccgccaaggccgatcatcttcgcatcttttgctttctggacgaatgttttcgttaattcgtcatcccgaagcgtgaaggtgacattcatgcgtgagcggctgtcttttctggcatgtcctttatagaagccgttgctttcatcaatacagctgtagagaacctgcgctttttgttcattgcgctgttcagcagtttccacaccgccgttttccttgagccactccagaacaaggctcagcatataaatcgcaaatgtcggcggagtgttgtagagtgaatccgctttgacatgcgtggaatatttcaggatttttgggacgttcgcattttcatttttcagccagttttttttcatgatgactacagtcacgccggaagggccgaggttcttttgggcgcctccgtagatcacgtcaaatttagacacatcgatttttctgcttaaaatatcgctggacatgtcggctacgagcggaattggagaattcggaaactcctgccactgagtgccgaaaattgtattgttggatgtgatatgtaaatatgcgccgtcttttacatccgtaaggtcaacctctggaatatagctgtaattgtctgtttcacttgtagcggtgatagacgtgttcccgaacaatttcgtttctgccagtgctttttcagaccaagcgcctgtcatgacaaaatgtgcggttttttcaggtgttaaaaagttcatcggaagcattgagaattgaaggcttgccccgccttgaagaaacaagatatcgtaatcttccggaatgcccatcagttcgattaagaggcttttcgctttttggtgcaccgcttcatactctttgctgcggtgggaaagctccataatagacatgccggattcgttaaaatcaataaattctttctgtgctttttgcagaacttccagtggcagcgctgcaggacctgcgttaaaattcgttgtacgttccattatgatctctccctgttttccacgttaatgtataaaataatacaattatcctatcacaaaaattcagttttttgataaaaaattagaattatcaaaagaaattgacggatgtttgcgaaatgttcacaaaataaaataacctcatcttatgatgaggccaggcgttttgcgatagaggaagagatgttctgcagatcctccggtttataatcatcagcatgcgttttccaaaccgctccgaatccatctccttttccgtagcgagggataatatgcatatggtagtggaacacagattgtccagctttttcgccgttattgttcagcgtatttaagccgatcggttcaaattcatcccggatagcgcgggcgattttcggaacagcatggaaatattgttttgctaattcatctgtaaattcatatacattctcaatatgtgttttcggaatgacaagcgtatggccttttgtcacttggctgatatcaagaaaggcaagtacatgttcatcttcatacaccttcgcggatggaatgtcgccggcgataattttacaaaagatacaattttctgcacaatgcatgagggttcctccttatgaaattgtttagtatgtatacactcatcgtaccacagaaatgcagaaaatagaaaacaggatgaacggcgagcgttcaccctgaatgcagaggaagagcttatatgaagaaaatgtgttatgcctttggtaagcacctcatttgtcaataaaatgaagacttgtttaatgcctaacgattcctgcgataaacacctcatttgacaatttgcttcatacatgaagaattcatcaattcagtgaagagaaatggtttgagcattggacatgtttattttctatccaactgtttctaagacgtctttgacaaacacctcatttttcagttgatatgcttttcctctacaactattatgatgtccagaaccctgtctctttatgacagcaaattcatcatttgttaaaagggaattgtttcaaatcaggccttgtttttggtactatgaagaaaaacactataaggggagaaactatgtctctgctatcggtaaaagacttgaccggcggatatacaaggaatccggttttaaaaaacgtatcattcacccttgaaccgaatcaaattgtcggattaatcgggctgaatggtgctggtaaaagtacaacaatcagacacatcatcgggctgatggacccgcataaaggttcaatcgaattaaacggtaaaacgtttgctgaggatccggaaggctaccgttcacaatttacctatatacctgaaacacctgttttatacgaagaattgacgctgatggagcatcttgaactaacagccatggcatatggactgtcaaaagaaacgatggagaaaaggctgcctccgctactaaaggaattccgaatggaaaagaggctgaagtggttcccggcccatttttctaaaggaatgaagcagaaggttatgattatgtgcgcatttttggcagagcctgcgctctacattattgatgagccttttctagggcttgatccgcttgccattaacgcgctgcttgaacggatgaatgaagcgaaaaaaggcggggcgagcgtgctgatgtcaacacacattttggcaacggcagaacgctattgcgattcgtttattattttacataacggcgaggtgcgggctcgcggcacgctgtcagagctcagagagcagtttggaatgaaggacgcggcgctggacgatttgtatcttgagcttacaaaggaagacgctggccatgaataatatgcttgatatttggcagtcgcggctgcaggagcatatcaaagaaacaagaacatacatgaaatatatgctcaatgatcacctcgtcattgttttgattttttttctagcgggcgctgcaagctggtacagcaaatggatacgggacattcccgctcactttccatccttttgggtgatggccgtgctgttttcgctcgtgttgacaagctcttatgtgcgaacgcttttgaaggaggctgaccttgttttcttattgcctcttgaagcaaaaatggagccttacttgaagcaggcgtttgtctacagctatgtgtctcagctgtttccgcttattgcgctgagcatcgttgcgatgccgctttatttcgcagtcacaccgggggcttcgctcgtatcgtatgccgcggtctttgtccaactgttgctgctgaaagcgtggaatcaggtaatggaatggcgaacgactttccaaaacgaccgcagcatgaaacggatggacgtcatcattcgctttgcggcgaatacactcgttctttattttgttttccaatctgtttatatgtatgcgcttctcgtctatgtcattatggctgtcctttatctgtatatgtcttccgcagcaaaacggaaaacatttaaatgggaaagccatattgagtccgaattgagacgaaagcagcgtttctatcggattgccaacctgtttactgatgtgccgcatttgcgaaagcaagccaaacgcagagcttatctcgactttttgctgcggcttgtgccgtttgaacagcgcaaaacatttgcctatatgttcacccgcgcctttttgcgttcgagtgattatttgggcattcttgtcagattaacgatcgttttcgcgctgatcattatgtatgtctcagctagcccgttgattacagcggttttgactgtgtttgccattttcattacgggcattcagcttctgccgctcttcggccactttgaccatctggcgcttcaagagctgtaccctgtgaaaaaagaaacaaagctgaaaagctatttctctctattaaaaactgcacttagtattcaagcgctgctgatgtctgttgcatctgcctatgcagccggcttgaccggttttctgtacgcgctgatcggttctgccgttctgatttttgttgttttgcctgcttatatgacaaccaggctgaaaaagcacggaaagctgtgaactgaaaagaggtaatcaaatgacagataatcagctgctgatgcaggaagctttggaatggaaaatgcattttttgcgaaaggattccatgtttgaacgcttttcgaagcgtgtgcagacgaaggtgaatgaacggattcctgaaaaaatccatacggtcgtcaccgagagtgtgaaaaaaatggtagaagcgacaatgaccggctccaatatcatcacttataaaaaggatacaagtgcactgtcgctcagtgaaaaaaatgaattggcgaaaaaaacgattgtttcttatcagaaagtgggagctgctgagggagtcggcaccggagcgggcggcatttttttaggcattgctgattttccgctgctgctttcaattaagatgaagtgtttatttaccttgtcttccatttacggctttgatgtgaaagatgcacaagaaagaatgttcttgctgctcgtgtttcagcttgcgttttcgagtgatgatggccgtaaatcgcttttttctgtcatcgaaaattgggagacggagaaaaagagcatcgactggagagtgttccagcaggaatatcgcgattatatcgacgtcgtgaagctttttcagcttttgccgggcgtaggagcggcagtcggcggaattgccaattataagctgcttgctcagcttggagaaacggcaagacatgtttttcatctgaggatattaaaggaaacagccggagaataaacactccggctgtttttttatagctgatgataggtgatcgcagcgccggcaaggaccttggccgctgtcagcatggctttttcgttgatatcaaatttcggatggtggtgggaataaactcggtctggctgttcgggagcggcacctgtaaagaaaaaagtgcctttcacgttttgtaagtaataagcaaaatcctcgccgcccatttgcggttcaccttcaatgacctgctgaacgccctcggtattctttgcggtgctcaccaagtggctcgtttcggcaggatggttcacaaccgccggataaccctgttcataggtgtactcataggacgcgccgtgcatgctgcatattccttttacaaccgctttaatttctttctccagaatgtcccggacattttcatcaaaagaacgtgctgtgccgatgagtactgcttggtctgcgatgacattaaacggattgtctgcgatgaaggaacctgtcgaaatgacggcggattgaatcggattgactttgcggctgacaatgtgctgcaaagaggtaacgatttgagaaccgattaggacggcgtctttagtatcatgcggatgagcgccgtggccgccctttccgaagactttaatcgtaaatcggtctgccgccgccattacggcaccggggcggcaaagaatggttccgagcggctcagttgcccaaagatgagtgccgaatatcacatccgcgttttcgagacagccgtcatcaatcattggctttgcgcctcccggataatattcttctgcatgctggtggatcatcacaaatgttcccttcagttcatgtctgttttggtgaaggaccttggccactgcgagaagagctgcggtgtggccgtcgtggccgcatgcatgcatgacaccaggcactttggaggcgtaagggacatctttttcatcttgaatggggagagcgtcaaagtcggccctcaaagcgactgtagggccgggttcgcttccttctatatatgctaaaacccctctgccgccaacgtttgtgcggattgggactcctaacgattcataataggaagcaataaatgcggcggttttttcttcttgaaatgagagctcaggatacatatgaaaatggcgcctgatctcaaccatttcttcaaaacagccgtcgagctgtttgtttatctctttctgcagtgtggatatggacaaagccgcttcccccttttctatgttttccatgattgtatataaaaagtctgaatatttcaactcatgctgttttaaagcatcatcacagctgcgagggttgtcaccaaaaggccaatcgcgacgggaatgaagttttttctggcaagctcaaaaggatcaactttgcaaatggccgcggcgggaatcagcgcccatgggactagtgttcctccgcccacccagatggcagagatttgtccgagcgcggtcagaacggcgggatcggcatggagagcggacgaaaagagctttgcgatggagccggcgagagaaatgccagaaaatcctgagccgtcaaggcctgttatggctccagcggcagttaatgcagcggcggcaagctcctttgacataggcatcatatgggataaagcaatgccgagatcgttgacaatgccgtgggaacctttagggagtgaagtgcccagtatgctctcatagcctgagtcgccaagataaaagaaagcggcaatcgggatgacggggccgaaaaccttaaaaccgaatttaaatccgtcaataaaatagccggtgattttttcaagccctttatgcttatacacgaaaaaatgaacggtaaggaggatacagattgcagacccgccaattaacgcggtggcatcatttccttgtaggttaaacaagagcatacaggcgatatctgcaagaaaggcaagcggaatcaaaaaagccagtatggaccgcaggcgttttggtaagtacagcgagttgtcttgttcgccggaaagaacgggggaaaaagaagcgggatgctcctgttttttgcgttcgcgctgaatcatgataaaggcagctgttgttgttgtcacacccataatcagcacaagcggaatgctggccgagacgacatcaccgactggaatgcctgctgcatccgcagtcagctttggcgccgcctgaatgacaaagtctcctgacagggcaaaaccgtgtccgaataagttcatggccatggccgcggcaagaggcgtcaaaccggcacgtgcggctgcggggagcaggacggcgccgatcaaagcgacacccggagaaggccagaagaagagagaaatggcgaacatcaggcctccaatcagccaataggcagtcacaggccctctcacaaggcttgcaaagggagaaatcatcgcttcatttatccctgtttttgttaacaaatcactcattgaaacgataaagcaaatgatgaaaatcgtgggcagcagttcgccggccgcatagataaagctgtggaataaactgctgacagaagctgaaagtgaatggctggcccatagcgatatgataaaaatgccgaatagagaaataaatgtcgtgtcttttctcagcagcataaataggataattactccgataaaaaacacatacagaacatggacagacaaaatcccgacttccatcatcgatcactccttccgcttacagattattcataggcgggcggaaggtgccgggacagaggggagggttatgatggaagatgaacattgatctgtttcagctgctcatcagatgatgccttaatactctattcgctttttgcagatgttttgggaagcattcaggagaaaaaatgacgcacccttcagcaaaccagttttttctataggcgatgatgctttccgatggctctaaatatgaatcatcctcgtgctgcatctcgtaatcatcaaatccgaactgaaaaccgcagcacgggcagatttcatgagaatgattgccttcatgatcatatggcggttcagtcaatcccttaaacccgcagactgggcaagtatgcttcattttgctttcctcccaataaaataagctgccggacatgccggcagctattcgacagcgaaatatgtggtgacataggaaggccgggagaagatcgacgttgtgtcaattccggcagatgtatcgcgttttttgtgggcttctttgtaagaaccggactgctgccagtcttgaaaggcgctttccgtttcccacaaggtcagaatgacataggtgtcactgtcaagcggacggagcactcgaattgcttcaaagccaggctcgttttcgacttttcccgctctgtttttaaatctgttttcaaacagcggacgtccttcctgagtgacggcaatattgttcaatactgcaaaaccgggatgtttgatctctccgacttggtcaatgacttcataagcgtgtggtgcctggaaaacggtatctccgtttgtttcatgaatcaaaatggcgttttcctgcccctgcatcaaaaggatattttctgagggatgcttttctacgatcgtttttaaaaaatcggctgtcccatatgtaatataaaccttcatatcagccacctcctgcttgctagtatatcaaaacaatggtataagtttctattggcgagtgcttcgaacataattccaaacaatttttcccatactacctttagaaaggcgaggtgagttcatgtttaagataaagaaaaagaaactttttatacctatcattattttagtgttaactgcttttctcgctttaataggatatatttcaattatttttctcggccattatgtcatagatgaaaagaagctgatacttcatgcttcttcaaaaattgttgatcaaaacggagatgaggttgcaagcctgtatacagaaaatcgtgagccggtctctatcaatgagattccaaagcaggtcagagaagcgtttatcgctgttgaggataaaaggttctatgagcatcacggcattgatgcaaaatctgtcggaagggcagtgtatcgcgatatattagcaggcggaaaggtggaaggcggaagcacgatcacccagcagcttgccaaaaatatttttctgacacatgacaaaacgtttctaagaaaaacaaaagaagtgatcattgcgattaatcttgaacgggattacagcaaggacaagctgcttgaaatgtatttaaatcagctttacttcggacatggggtttacggcatacaagcggcgtcccactattattttaataaagaagtaaaagatttgactgtatctgaaggcgctgttttggccgctattccgaaggcgccttctacgtactctccaattttgcaccctgataaaaataaggagcggcgtgatacaattctaggtatgatgaatgaccaaggctatatcagtgcgaaagaggctgtcaccgcacagggccgaacgcttggactgcacgtgaagaaacagtcggaaaccccttggtttgacagctacattgaccttgtgatcaaagaggcggaagacaagtattccatttccggagagcagcttcttcaaggcggatacacgatcaaggtgccgctcgattcgaagctgcagaagacggcttaccaggtgatgaaagagggaagctattatcccggaacagatcagaatgccgagggaagcgcggtatttattaataacaagacaggcggtgtagaagcggccatcggcggaagggattacacatccaaaggatataaccgtgtcacagctgtccgccagccgggttccacatttaagccgcttgctgtatacggaccggcgatgcaggaaaagaaatttaagccatattctctattgaaggatgagttgcagtcctacggagattatacgccgaaaaactacgacagcatgtatgagggcgaagtcactatgtctgacgccattacgtacagcaaaaacgcgccggctgtctggacgctgaatgagatcggcgtcgaaacaggaaaatcttatttgaaagcaaacggcattgatatccctgatgaaggccttgctctcgctctaggaggcttggaaaaaggcgtttcgccgctccagcttgccggcgcgtttcatacatttgccgcgaatggaacgtatactgaacccttctttatctcgagcataatagatgaagacggagaaacaatagccgattataaagaagaaggaaagcgggttttcaacaagcagacgtcttggaatatgacgagaatgctgcagcaggtagtcaaaaagggaacggccacgtccggcacctatcacggcgacctggcgggaaaaacaggctctacatcttatacaggcgtctccggcgcgacaaaggacgcctggtttgcaggctatacgccgaaaataaccggggcagtctggatgggctatgacaaaacggatcaaaaccattatttgaaagccgggagctcatacccgacgcggctgtttaaggatattttgacacaggcaggagaaaccggtcatgtgttcacaaagcctaaaaacgttaaagacctggaaagcccgattgagctgaagccggtcaaaacactcacagccgattacacatttaaagcagcggggctctttactattgaattaaagtgggacgctcaagaggatgatcgggccgtatacagaatttatgtaaacaaggacggcgaggagacgcttcttgattcggttgaagggaagggaagctatgaaattccttatgccaacttattttcgggcgcgtcttataaaattgtgccttataatacacagacaaaaagagaaggggaaggaaccgattacgttcagccgaaattgttttcctcttaatggaattcggcgattttttgaactttgagctacatttctataccatttgcctaaaacaaggtatagtgtaataagtcaagaaatacgaacgtatggttgccgtatgaaaggtggaaatcagatgagtaaacgagaaacgtttaacgagacgtttttaaaagctgcgcggggagaaaaagcggatcacacgcctgtgtggtatatgagacaagcagggcgctcacagccggaatatcgcaagctgaaggaaaagtacggattgtttgagatcacacatcagcccgaactttgtgcgtatgtcacaagactgccggttgagcaatacggagtcgatgctgcaatcctttataaagatatcatgacgccgctgccgtcaatcggtgtggatgttgaaatcaaaaacgggatcggtcctgtgattgatcagccaatccggtctctggcggacattgaaaaactcggccagattgatccggaacaggacgtgccgtacgtgcttgagacgattaaactgcttgtcaatgagcagctgaacgtcccgctcatcggtttctcaggtgcgccttttacgcttgcaagctatatgatcgaaggcggcccgtcgaaaaactacaataaaacaaaagccttcatgtacagcatgccagatgcatggaatctgctgatgtccaagcttgccgacatgatcatcgtgtacgtgaaagcgcagattaaggcaggcgcaaaagcgattcaaatctttgattcgtgggtcggcgcattgaatcaggcagattacagaacatacatcaaacttgtgatgaaccggatcttttcagagctcgcaaaggagaatgtgccgctgatcatgtttggcgttggcgcaagccatcttgcaggtgattggcatgaccttcctctcgatgttgtcgggcttgactggagactcggcattgatgaagccagatcaaaaggaattactaaaacagtgcagggcaacctggacccgtccattttgcttgcgccatgggaagtcattgagcagaaaacgaaggaaatacttgatcagggtatggagtcagacggcttcattttcaatcttggccatggggtatttcctgatgtcagtcccgaggttttgaaaaaactgacagcatttgtccatgaatattcacaaaacaaaaaaatgggtcaatattcctaagcatatcttttggtatcttaatgatatcctgtcaaaatgtttgtatcagatcattaaagagggtgtaaacagtgagtagaaagaaaatggggcttctcgtgatggcgtacggcacgccttataaggaagaagatattgaacgttattatacacatatcagaagaggcagaaagcctgaacctgaaatgcttcaagatttgaaagacagatacgaagcgattggcggcatttcaccgcttgcccaaatcacagaacagcaggcgcataatctggaacagcacttgaatgaaattcaggatgagattatgtttaaagcgtatatcggactgaagcatatcgagccgtttattgaagacgccgtagcagagatgcataaggatggcattacagaagcagtcagcatcgtgctggcgccgcatttctccacgttcagcgttcagtcctacaacaaacgcgccaaagaagaggctgaaaaactcggcggcttaacgattacgtcagttgaaagctggtacgatgaaccgaagttcgtgaaatattgggttgaccgagtgaaggaaacatatgcgtcaatgcctgaggatgaaagagaaaacgcaatgctcatcgtatccgcacacagcctgccggaaaaaatcaaagaatttggagacccgtacccggaccagcttcatgaatcggcgaaattaattgctgaaggcgcaggcgtttccgaatatgctgtcggctggcaaagtgaagggaacacgcctgatccttggctcggacccgatgttcaggatttaacacgtgatttattcgaacaaaaaggctatcaagcatttgtatatgttcctgttgggtttgtcgcggatcacttagaagtgctttatgataatgattatgaatgcaaagtggttactgacgatatcggcgcaagctattaccggccggaaatgccaaatgccaagcctgaatttattgatgctttggcaacagtcgtattaaaaaaattaggacgttaaagaaggcgatgaacatgagtgacggcaaaaaacatgtagtcatcatcggcggcggcattaccggtttagccgccgccttctatatggaaaaagaaatcaaagaaaagaatctgccgcttgagctgacacttgttgaggcaagtccgagagtcggcgggaaaatccagactgtcaagaaagacggctatatcatcgaaagagggccagactcatttctggaacgaaagaaaagcgccccgcagcttgttaaagacttaggtcttgagcatttgcttgtcaacaatgcgaccggacaatcctatgtgcttgtaaaccgcaccctgcatccaatgccgaagggcgctgtaatggggataccgacaaaaattgcgccgtttgtttctacgggtctgttttctttgtctgggaaggccagagctgcaatggatttcatcctgcctgcgagcaaaacaaaggatgatcagtcattgggagaattcttccgcagacgtgtcggagatgaagtggtcgagaacttaatcgagccgcttctatcagggatctacgcaggcgacattgacaagctcagcctgatgtcgacatttccgcaattttaccagacggaacaaaagcatagaagcctgattctcggcatgaaaaaaacaaggcctcaaggctcaggccagcagctgacggcaaaaaaacaagggcagttccagactctgtcaaccggtttgcagacccttgtagaagagatcgaaaagcagttaaagctgacgaaggtgtataaaggcacaaaagtgaccaaactcagccatagcggctctggctattcgctcgaactggataacggcgtcacacttgatgctgattcagtaattgtgactgctccgcataaagcggctgcgggaatgctttctgagcttcctgccatttctcatttgaaaaatatgcactccacatccgtggcaaacgtcgctttaggtttccctgaaggctccgtccaaatggagcatgagggcacgggttttgtcatttcaagaaacagtgactttgcgatcacagcctgtacgtggacgaataaaaaatggccgcacgcagcgccggaaggcaaaacgctgcttcgggcatatgtcggaaaagctggagacgaatccattgtcgatctatcagataatgacattatcaacattgtgttagaagacttaaagaaagtcatgaacataaacggcgagccggaaatgacatgtgtcacccgatggcatgaaagcatgccgcagtaccatgtcggccataagcagcgtatcaaggagctgcgtgaagcacttgcatctgcgtatccgggtgtttatatgacaggcgcttctttcgaaggtgtcggcattcccgactgcattgatcaaggaaaagctgccgtgtctgacgcgcttacctatttattcagctaaaacctccgctttatcgcggaggtttttttgatgtgcaatggcaatattgtgtaaaaaaatgattgaattgaacggcaggttatgatacatttgcatatgtacttaatgactaaaatgttcaaacggtcagtttcgaggtgaatacaatgtcaatagatcgaaaaaagctcattttggaggcggctacaaagtctttcacgcagttcgggtataaagcgacgacaatggatcttgtcgcaaaacttgcgaacgtggggaagggaaccatttatacttttttcaaaaacaaagaagagctgtttgacgagattttcactactttattaaaggaaatgaaacaaaaagcggatgaagcgatggagccgaaccttccgttccatgaaaatgtgcacagagcgctgtttgccattctggagttcaggaaaacacatcagctgacgattaaaattttccaagagaatgccgagattggtacaatggctgttcaggaagtgatccagaaaatggagcgagccatactgtcttatatcaaaagtaagattgaagacgggatcaaaagcggcgcaatcaagccgtgcgaccctgaactgacagcctttgtgatgctgaagctttatatcgcgctcatttttgactgggaaaaacaacaccccccgcttgataaagagacaattgcgggactgcttgaattgtatgttgtcaaaggattgtcagcgaactagataatcctttctctttgcaagaaaatgaccatttttcatgatgagtcagttttagaatggaggcatcaggatgaacacaatacgaagtcagtggaaagacatcgtaacaagtaaaaaattattgattcccatcatcgccattttgtttgtcccgcttatttacagcggcgtattcttaaaggcttattgggacccgtacggcacagttgaccagctgcctgtcgttgtcgtcaaccaagacaagggagcaacgtatgaaggagaaaaacttcaaatcggtgatgatctggtcaaagaattaaaggataataacaactttgattggcatttttccaatgatctcgaccaatcgttaaaggacttattgaatcaaaaatattatttagttgtcgagattcctgaggatttttctaagaatgccagcactgtattagacaaaaatccgaaaaaattggatctgaaataccatacaaatgcaggttctaactatgtaggggcaacgatcggcgaaaaagcgattgataaactgaaagcctctgtttcaaaagaagtgaccgagcaatatacgaaagttatttttgataactttaaagatatcgcaaaaggtttgagcgacgcgagcagcggcgcgaaaaaaattgatgacggcacaaaggatgcgaaaaacggaagcgcccagctgaaagaaaatctggcgaagctgaaggaaagcaccgctaccatcagtgacaaaacagcgcagcttgcagatggagcggctcaggtgacgagcggcatccaatcgcttgacagctcgctcggtaaattccaggacagcagcaaccagatttatgataaatctggccagcttgcagcaggatcaggcaagataacgggcaagctgaatgaactgaatgccggccttcaaaaggtgcagcagggcttgcctaatctgacaaacgggctggatcagctaaacagtaaagcgcaagaaggttctgagaaagcatcaaaagcggaaaaacttataaatgcgctcgatttaacgaagcttgaaacagctgtgaataacctcgaaaagtcagaaacagcgatgaatgaatttaaaaaacagctgtctgactttgaaaacagcttaaaaaaccgtgatcaggcatttaaaaatatcatcaactccagtgatttcttaacagcggagcaaaagagccagctgatcagctctgttgaaaagcagcttccgaaagttgatgcgcctgattttgatgaaattttaagtgggcttccttcagctgatcagctgcctgacatcgcaacgataaaaagctcattggaagatgtgaaagcgcaggttgcccaggtgaaggcattgccggaagctacctctaaactttataacggcgcaaaagccactcaagacgcgattgacaaattaactgctggatctgagaaattatacaatgcgtcacagcaggtgacagatggccaaactaaactgacagccggcatcggtgaatataataagcagttcgcaaaggcaaaagcgggctcagagcaattggtgacaggaagcagccaagtatccggcggattgtttaagctgttagacgggtctaaacaggtccaaagcggatcatcaaaacttgcagacggatctgcatcacttgatacaggtttaggcaagctgttggacggcacaggagagctgtctagtaagctgaaggatgcggctgaccaaacaggagatatcgatgctgatgatcaaacatacggcatgtttgcggatccggttaaaaccaaagatgatgccattcattccgttcctaactatggaacagggctgacaccttatatcctgtcaatgggcttatatgtcggcggcatcatgctgacggttgtcttcccgctgaaggaagcgtcagggcgtccgagaaatggttttgagtggttcttcagcaaattcaatgtcatgatgcttgtaggaatcattcaatcattgattgtggcgacggttcttctattgggaattggtctcgaggtagagagcacgtggagattttacgtgtttacgatcattacgagtctagcttttctagcgataattcaatttttggctacaacgatgggcaacccgggacgatttatcgcagtcattattttagtgctgcagctgggagcgagcggaggaaccttcccgttggaattgcttccgcatttctatcaggtcatccatggcgcattgccgatgacctacagcattaacggattcagagcagtcatttcaaacggtgactttggctacatgtggcagatggccggcgtcttaatcggcatcgccctcgtcatgattgcactaagcattacttactttacaatgttaagccggaaggaagaaacatcagaagaacagccggcttcataaagaaaaagaacttgtttccttggaaacaagttctttttttgttacattccccatttaataagcaatcctgtataggttaatccgccgccaaacccgaaaagcaaaacgatttgatcttttttcagcttcccggctttcactgcgagatcaagcgccaaaacaattgaaaccgaagatgtgtttccgtagtgctcaacactagtgagcgttttttcaatcgggaacggtgttttttcacaaattgactcgatcatgcgcaagttcgcgctgtgaggaacaaaccaatcgagatcatcagagctgagtcctgctttatgtaaaagccgttcaaattcgccagggacagttcttgcggcccatttatatacctcgcgtccgttttgcaccatttttccagaaccgacaagctgcacaccgtttatttcatttcgcagtccggcacgatacaaaatatcgccgccgttcccgcttgttccttgtacagacgcaagaaatcccggcgtttcttcatctcgttctactaacagcgcacccgcggcatcgccgaacagtacgcatgtcgttcgatcggtataatcggttacctttgataacgtctctccggcgatgacgagaattttttgatgaaggccagatgtgatcaatccatttgccaaatggaggccgtatgtcagcccggcgcatgtcgcattaatatccagcgcgccggtgctttcccagccgaaatattcctgtacgcggcatgccgtactcggaaaggcgtaatcggatgtggttgtggcaacgaggatcatatcgacatcatcaagcgttcctttataacggctcttgagattcttcaccgcttctatgcataaatcagaggtaaattgatgttcatccgcaatccggcgttctctcattcctgtgcgctgaacgatccattcatcagaggtatcaacgatcttttctaaatctgcattggttaaacgtctgctcggcgcataggtgccgatagctgtaatttttgcttttgacatatgaatcactccttatggtcagattataacactagatattagtatctggtactaaaaagaaggtttttttacaaaaaaagagaagtgtagataggaatctatgaaaaagaaaaaggaggctgaaaaatggtcagtcaagaagcagtagtctttttggcattatccggggctattgcgtttctgttgccaatcgggctgattgtatggtttaagcgaaagtatggtgcctcgcttaaagtgttttttattggcgctctcacgttttttgtcttcgctcagctgctggaaggcggcgttcatgtttatgtactgcaagtgaatgaaatgacgaaagaagcgatgcagcatccattatggtatggcatttacggctgcttgatggccggaatttttgaggagtgcggaaggtatatgatgatgcgattttttatgaagcgccatcatacttgggcggatggtctggctttcggggcaggccatggcgggcttgaagccatcctgattacaggcttgtcctctatctcacttattgtatacgcatttgcaatcaatagcgggacgtttgaacagcttttggtcaatggcgacgtcaaacaggcgcttttgccgatacaggagcagctgctgcatactccttcgtatgaatggatgctgggcggaatagaaagaatcagtgccattgccgtccaaattgggctgtctctgcttgttttgtacgcggttaaaagccgccggccgctgtttttgttgtattctattcttttacatgcactgtttaatgtaccggcggttttatatcagagaggaatcatagagcatgctgctgctgttgaaatcattgttgctcttatagcggctttatcagtttattggattgtaaaagcaaaaagggtgtttcaataaaaggtccaagcagcagcaatgcccgcttggaaaaatgtgaatggaaatattcattaagcgtgggtcatcagaatatttctgattcagtctttagcaatgacagcaagaatgtctgtgttttttacaagagaaacaatggtgtttctttttcttcttctcgcaagggtcatggcattctttctttttcttgcaatggtcgtggaaatctttatcgaaccactcgtcaaagaaccaaaaatcatcgaaccaatcgtgacaacgacatttctgttcatgtgaatgacgacagcacatagaaatccctcctcttcccatgctctctacagcatatgagagattgataggaaaagattggacgggtccctcgggaaaagagtatattttaagtagaaaataaaaggaggaatgccctatgacgtccgtacgtaaaacgatggagctcattaaagaacttgtatcgatcccaagcccgaccggaaatacatatgaggtgatcaattatattgaaagccttttaaaagaatggaaggtagaaacggttcggaaccacaagggcggcttaattgcaacgcttccaggacgcgacacatcccggcatcgcatgctgactgcgcacgttgacaccctcggcgctatggtgaaggaaattaaagcggacggccggctgaaaatcgatttaatcggcgggttccgctacaactcgattgagggagagtattgccaaattgaaaccgcctcaggaaaaacgtacacaggcacaatcttaatgcatcaaacgtctgtgcacgtatacaaagacgcgggaaaggctgagcggaatcaagagaatatggagatccgcctagatgaacctgttcactgccggaaagatacggaggagcttggcattggcgtcggagactttgtgtcgtttgatccacgtgtcgagatcacatcaagcggatttattaaatcgcgccatttggatgacaaagcaagcgtcgccttattgctccgcttaattcatgaaattcaaacagaagacattgagctgccgtatacaacccattttcttatttccaataatgaagaaatcggttacggcgggaattcgaatattcctcctgaaacagttgaatatttggcggttgatatgggcgctatcggtgacgggcaggcgacagatgaatattcagtatcaatctgtgtgaaggatgcgagcgggccgtatcattatcagctcagaaagcatttagttcaattagccgagaagcatcatattgactataagcttgatatatatccgtactacgggtctgatgcgtcagcagcgatcaaatccgggcatgatattgtgcatggcctcatagggccgggaattgacgcttcccatgcatttgaacgcacccataaatcatctcttcgccataccgctaagcttctgtattactatgtacagtcaccaatggtataagggggaggaccaatgaagatttataagctgaaaagcacattcggttgggaaggtgatgacgggttgggagaacagctgattcagcagatccttgccggagaaaaaaacgccacgtgcgcgccgaaatcattgtattcaaaagatgaattgagggacgtttatcaaacagcgggtcagcttgttaccgtttatgataaacatgacaatccaagatgcaatataaaagtaacagatgtctttgaaaccacctttggtgcgcctgatatgaggttagtcaaaggagagggcaatggagaccgaattgaggagtttcaagaggatcatcggatggcatgggcggaactgatcaaaagcggtgaactggagctgaatgaggatactgttttgattacagagttgtttgtgcttgttaaagattaaaaaagcctgcggggcaagaaccccgcaggcttttcattaaccagaaatggttgcgttttgttctgttttcgattgggacataacagtttctgctttcgcaggattaaacatgccttcccatttagacatcacaacggcagcaagcgcgttaccagtcaggttgacaactgtacgtgccatatccatgatgcggtctacgccggcaataaaggcaagtccttcagccggaacgccgatggtgccaagcgttgcaagcaagacaacaaaagaagtaccaggcacggcagccatccctttagatgtcaccattaagacgagcacaagcgtaatttggtgccaaatcgtcaaatcaatgccatatacctgtgctaaaaagagtgcggcaatagattgatagagaacggaaccgtctaagttaaacgtgtaaccgatcggaatgacaaatgaaacaatgccttttggacatccgattttctccattttttccatgatacgaggaagaaccgtttcagagctggacgtactgaacgccagtaagatttcgtccttcatgtaagcaaggaacttgaagatgctgatgccggcaatttttgcgacaatcccgaaaataacaattaagaagaaagcaagcgcgacataaaccaatccgacaagctttccgagagagataagagaaccgagtccgaatttagacacagtcactccgataagagcgaaaacgccgaatggcgccactttcatcacaaggtttacaacgtggaacatggcatgggatacaccttcaaaaaaggctaatacaggcttgcctctttcaccgatcgcggaaatacccaatgcaaatagtactgtaaagcagatgatggctagaagatccccttcgaccaatgactggaagaagtttgtcggcacaatatggaggaacgtttccgccactgatttattactttgttctttttcagtttcaacatattgactgatgtccgatttttgagcttcgtgtatattaactcctgtacccggatggaagatgtttgcaagggctagtccgagaataatggcaaaagtcgtgatgatctcgaagtacagaatcgttctgaagcctaatttaccgacttgctttccatttcctgcaccggctacaccgatgattaagctggagacaacaataggaatcactatcattttgattaagcgtaaaaagagatccccgattggctgcaggtaagtaggcaatgctgggttgccataccaaatgacgccaacaatgacacctagaataagtccaacgaatatttgtgtggctaatccaaacttaattcttttcatagattacctcccaaaaaacaaagtatcaacatatatcatgaatagacatatatttaatctcactattagatcaaattataatagataagaaatcaattcgtctatagtaaattatatttcgaaaataaagaatattcaatgacattatgataatcaccagaattatctaaaaacaggtgagctttgacctaacctgactattatttcaaaattaagagatatgtgaaaaaataagaaaatcccacgcgtaaggcgcgggattttcgctcattacaaatcgtttacttttatacagtcattgcagatattaccataacactcatgctgctcttctatcttttttccgcattccgcacactttttcgaaggcaggtttctaaaaaattctgtgattttccccagcataaccaatccctctttcccctttgtagtgatttcattgtaatataacagatcgcaaaaatcaataactgttttgatacaatgtttaaaacatgcttttttcaagaaaaatgggtatattgaaggaggatcaattttttttgaaaagataggaggacattatgaaagttacagttatcggatgctatggcggttttccggccgcaaatgaagcgacgtcaggctatttgtttcagtcaggtgattactctctgcttgttgattgcggcagtgccgttttgtctaagctgttcggatatgtgccggcggaaaagctggatgcggtcgttctgtctcattatcaccatgaccatatcgctgatatcgggccgctgcaatttgccaagcaagtcggttcgtttctcggcaaaggagagcatacgcttccgatttacggacatgatgctgatatagaacagtttcaaaagcttacatataaaacacatacaaaagggatcgcctatcagccggatcagccgttgactgccggtccgtttacgatcacctttttaaaaacgattcacccggtgacgtgctatgccatgcggattactgacggcagccacactgtcgtttatactgctgattccagctatcaggattcatttataccgttttcgaaagatgctgatttattgatctcagaatgcaatttttatgccgatcaagacggaacaagtgcaggccatatgaacagcctggaagccggacgcattgcaaaagaagccggagcgggagaactgctgctgacacatttgccgcattttggcgtgcatgacaatcttcgcaaagaagcgaaaaccgtttttaacggagaagtgaatattgcgaaatcaggttttgtgtgggaaggataaaggaggagcaccatgttatttatagacaatcaaaatatcaatgatccgcggatcaatcttgctatcgaggagtactgcgtaaagcatttagaccctgaacagcaatatttgctcttttatgtgaatcaaccgtctattatcattgggaaaaaccaaaatacaatagaagaaatcaatacaaaatatgtagaggaaaacgggattatcgtcgtccgccgtttatcaggcgggggcgctgtgtaccatgatctggggaacttgaacttcagctttattaccaaggatgacggggacagctttcataactttaaaaaattcactgagccggtgattcaggcgttacatcagcttggggttgaagctgaattaagcggccggaacgacattgtagtggatggccggaaaatatccggaaacgctcagtttgcaacgaaaggccgtattttcagccacggcaccctcatgtttgattcagccattgatcatgttgtatcagcattaaaggtgaaaaaggataaaattgaatcaaaaggcatcaaatcgatcagaagccgagtagcaaacatcagtgagtttctcgatgataaaatgaccaccgaagaattccgcagccatttgcttcgccatatttttaacacaaacgacattggaaacgtgccggagtataagctgacggaaaaagattgggagaccattcatcaaatttcgaaagagcgctatcagaattgggattggaactacggccgctcgccgaaatttaaccttaatcattcgaaacgttatccggttggatcgatcgatttgcgcctagaggtcaagacaggcaaaatcgaggactgcaaaatcttcggagatttcttcggtgtcggtgatgtatctgaaattgaaaacctgctggtcggaaaacaatacgaacgcagcgtcatcgctgatgtgctcgaaggtgtgaatctcaagcattactttgggaacattacgaaagaggatttccttgatctgatttattaaggcaaaacacatcgtttgaaagagcggttgtgtttttgaaataatggaggcaggagggattcacatgaaagtgtttttaatcggagcgaacggacaaatcgggcaaagactcgtctctttattccaagataatcctgatcattccatcagagcgatggtcagaaaagaagaacagaaagcgtctcttgaagctgccggtgcagaagctgtgcttgcgaatctggagggcagcccggaagaaatcgccgctgcggcaaaaggctgtgacgcgatcattttcacagccggttccggtggcagcacaggctatgataaaacactgctggtggatctcgatggagcggcgaaagccattgaagctgcggacattgccggaatcaaacggtttattatggtcagcgccctgcaagcccataaccgtgaaaattggaatgaggcactcaagccttattatgtggccaagcattatgctgataaaattctggaagcgagcggtttaacctatacgattatccgtccgggaggccttcgcaatgagcctggaacgggaactgtttcagcagcgaaggatctggagcggggatttatttcccgtgatgacgttgcaaaaacggtcattgcctctttagatgagaagaatacggaaaatcgggcctttgatctgacagaaggagatatgccgattgccgaagcattgaagaaactatgacagtactgacactcagggctttttgctcttgagtgtttttttctgtttctctataatggaggagaaagcttggcttcaataatgaatgactattcattcactttaaggggtgggagaatgaatcttgtttcaaaattggaagaaacagcatctgagaagcccgacagcatcgcatgcaggtttaaagatcacatgatgacgtatcaagagctgaatgaatatattcagcgatttgcggacggccttcaggaagccggtatggagaaaggggaccatctagctttgctgcttggcaattcgcctgattttatcatcgcgttttttggcgctttaaaagctgggatcgtggttgttcccatcaatccgttgtacacgccgacagaaattggttatatgctgacaaatggtgatgtaaaggcaatcgtgggcgttagccagcttttgccgctttatgagagcatgcatgaatcgctgccaaaggttgagctcgtcattttatgccagacgggggaggccgagccggaagcggcggatccagaggtcaggatgaaaatgacaacgtttgcaaaaatattgcggccgacatctgtcgctaaacaaaatcaagaacttgtccctgatgataccgcggttattttatatacgtcaggaacgactggaaaaccgaaaggcgcgatgctgactcatcagaatttgtacagcaatgccaacgatgttgcaggctatttgggaatggatgagagggacaatgtggtctgcgctcttcccatgtttcacgtgttttgtttaaccgtctgcatgaatgcaccgctgatgagcggcgcaactgtcttgattgagcctcaattcagtccggcatctgtttttaagcttgttaagcagcagcaggcgaccatttttgccggtgtgcctacaatgtataactacttgtttcagcatgaaaacggaaagaaagatgatttttcttccatccggctgtgcatttcgggaggcgcggccatgccagtcgcgttgctgacggcgtttgaagaaaaattcggtgttaccattttggaaggctacgggctctcggaagcatcacccgtcacgtgctttaacccatttgacaggggcagaaaaccgggctccatcgggacaagtatcttacatgtcgaaaacaaggtcgtagatccgctcggacgcgagctgcccgctcaccaggtcggcgaattgatcgtgaaaggccccaatgtgatgaagggctattataaaatgccgatggaaacagagcatgcattaaaagacgggtggctttatacgggggacttggcaagacgggatgaggacggctatttttacattgttgaccggaaaaaagacatgatcattgtaggaggatacaatgtgtatccgcgggaggtagaggaggtgctgtacagccatccggacgtcaaggaggcggttgtcatcggcgtgccggacccccaaagcggggaagcggtaaagggatatgtggtgccgaaacgctctggggtaacagaggaggacatcatgcagcactgtgaaaagcatctggcaaaatacaagcggcctgccgccattacgtttcttgacgatattccgaaaaatgcgacggggaaaatgctcagacgggcactgagagatattttgccccaataaaatgaaaaagcgaagcggttagcttcgctttttcattttcaatcctttgcttcttttttaataatatttagcagcgcctttgtatcatttttgcttaatttgtagtatgtgccatccttcaaaaaaacggcttgctggctgccgtcaatccatagtctgaatgagtcataccggtctttatgaaacttgattgtcccttcgtaatcaggggctgatgttttttctgtcttcacctgttttccctgattcataatatccagcatatctttgacgtgctgtcttttttcaatctcgatatcttcctggccgcttgaagacagtgtgatcaaatccgcgtctaccgattgatacacatcgcctgatcggctgtaaagataaaaaaatgcgataaacacaagaccgattaccacgatggctgccactatttttttcatttgcatcactccaaacattgttagttttcccagcgatcgggctttccatgcttaaaagggtggaaaagtgcggaacacagcttggttctaagaatttgaatttatgattacaatagaagtaacgggttgatgtgaggagtgaggcgttatgcgcaagtggattgcggcagcaggacttgcttacgtgctgtacgggctgtttttttattggtattttttcctgtcgggtgattccgcaataccggaagccgtgaaagggacgcaggctgatccggcttctttcatgaagccgtctgagttggcagtggccgagcagtattcgaatgtcaagaattttttattttttatcggggtaccacttgattggtttctgttttttgttctgcttgtcagcggtgtttcaaagaaaatcaagaaatggatcgaagcggccgtgccttttcggtttttgcagaccgttggttttgtgtttgtgctttcgctgattacaacattggtgacgctgcctttagattggataggctatcaagtatcgcttgactataacatttccacacagacaacggccagctgggctaaggatcaggttatcagcttttggatcagctttccaatctttacgctttgcgttctcgttttttattggctgatcaaaaggcatgaaaaaaaatggtggttatacgcctggctgttaacagtgccgttttcgctgtttctgttttttattcagccggtcattatcgatcctttatacaatgatttttatccgctgaaaaacaaagagcttgaaagcaaaattttagagctggcagatgaagccaatattccggctgaccatgtatatgaagtgaacatgtcagaaaaaacaaatgcgctgaatgcctatgttacaggaattggggccaataaacggattgtattgtgggatacgacgctgaacaaacttgacgattcagaaatcctgtttattatgggccatgaaatgggccattatgtcatgaagcacgtttacatcggtctggctggttatttgctcgtgtcgctcgccggattttatgtcattgataagctttacaagcggacggttcgcctaacccgcagcatgtttcatttagaaggacggcatgatcttgcggcacttccgctgttattgcttttgttttctgttttgagctttgcggtgacgcctttttctaatgctgtctcgcgttatcaggagaataaggctgaccagtatgggatcgagttgacagagaacagagaagccgctgttaaaacgtttcaggatttggccgtgacggggctgagccaggttgatcctccggtgcttgtgaagattttcagaggcagccatccttcgatcatggaacggattcaacatgcggagaaagaagagaatgcgccggaacatcaggatgctgacaaataaaaagaagcaggtatggaggaacctgcttctttttactattattgtgcagctgcttgtacgttgattaacccttttccatagtagaaagagtttccaagatatgttgcagtgctttctaaacgatcacggacttgcgcgtttgtccaagtcgggtgcttagaaagaattagcgctgctgctccggcaacgtgaggagtcgccatggacgtgccgttgtaagcaccgtaagtgcctccaggaagtgtgctttggatggatacgccaggagccatcacatcaagctcagaacctgcgcttgagaatgaagctctttggttgctgctgtttaccgcacctaccgcaatagtagaaggatattttgcagggtagccgactgtgcttgagcttccggacgaaccttcgtttccggcagcggcagcaacgacgataccgctggaaacggctttatcaacgactgttttcagcgctgtagaaccagaaggtccgccaaggctcatgttaataacatccatattgttggaaatggcccattcaatgccgttaataatccagctatattggccgcttcctgttgaatcaagcacttttactgcatataatgatgcgcttggcgctacgcccagaacaccgattgagttattaagagcggcaatcgtaccggctacatgcgtaccgtgagaactgccgtcctggtatgggtttgtttcagaaggtacgaagcttgctccgcctctgacgtttaagtcaggatgagaagagtcaattccgctgtcgataacagctacttttacgttagagcctgtgtagccttgagagtgaagagccggcgctttaatttgagaaatgccataaggaacagattgcgcatattcatgtgcaatatgatcttcttccacatatgcaacgctcggatcttttttcaattcttttacagctttttcatccaatgttgctgcggccgcgttaacatacttaaattgcttttgaacctttccgcctttttcagaaataacatcctttttcttggcggaactcatggcactcattgtctgtttaaatccgacaatgtatttcttttctgtactgctttttccggcagcctgcgcagacatgttgctgaacgccatcgtaaagattaacgttaacgcaaacaacaagctgatccacaattttttgcttctcactctttaccctctccttttaaaaaaaattcagagtagacttacttaaaagactattctgtgaatttattgtaatagatggaataatattttagtagacccatttttttgagatgattttatctctatttaggtatatcatctctcgctatttccgtagagactcgaaataactattttcatacagaaaagaacgaaaatagacatgagtaaatgttcattatgctgaaatgtcatgcttttttaggttaaatgctcctgagtcccggcaaatttctgtcgaaaaaattcgttcaaatgacctgcgtgtgcttccgtgagaacaatggatattatcgtgatattttttcaaagcatgatgataaaagtattctgaaaaataaactttacagaaaagggatagaatgaaaaaattattgagagggaggaagaaataagatgaacattcgccaagcaaagacatcagatacggccgccattgcgccgttgtttaaccaatatcgggaattttatagacaggcatccgatttgcaaggggcagaggcttttttgaaagctcgtttggaaaatcacgagtctgttattttgatagcagaagaaaatggagaattcataggctttacccagctctatccaacgttttcttctgtgtcaatgaaaaggatatacatattaaatgacttatttgtcgttcctcatgcacgtacaaagggagccggctgccggctgctttctgccgcaaaggattatgcagaggaaaacggggcaaaatgtttaacacttcagactgagcaccacaaccggaaggcaagaagcttgtatgagcaaaacggctatgaagaggataccggatttgtccattattgtctcaatgtgccggcgaagtgaaaatggcggcttgatgatttggttttttgaacgttcttcggttacgatataaatgaaaaggagtgtgccgaatgtcaacgttatttcaagccttgcaggcagaaaaaaatgccgatgatgtttcagtccatgtgaaaaccatatcaacagaggatttgccgaaggatggtgtcctgattaaagttgcttattccggcattaattacaaagatggtctggccggaaaagcaggaggcaatatcgtcagagagtatccgcttattttaggcattgatgctgcgggtacggtcgtctcttccaatgatccgcgttttgcggagggggatgaggtgatcgcgacaagctatgagctcggtgtctcccgtgatggcggattaagtgaatacgcttcggtgcctggtgactggctggtgcctttgccacagaatctttcgttaaaagaagcgatggtgtacggaacggcgggatttactgcggcgttatcagtgcatcggcttgaacagaacggtctgtctccggaaaaaggcagcgtgctagtcacaggagcaaccggcggtgtcggcggaattgcggtatcgatgctgaacaagcggggttatgatgtggtggcaagtaccggaaaccgggaggcggctgattatttgaaacagcttggtgcaagcgaagtaatcagcagggaagatgtctatgacggaacgcttaaggcgctgtccaagcagcaatggcagggagcggttgatccagtcggcggaaaacagcttgcctcgcttttaagcaaaattcaatacggcggatctgtcgcagtgagcggcttaaccggcggaggagaagttccggcaaccgtgtatccttttattcttcgcggagtaagcctgctcggaatcgattcagtatattgtccgatggacgtcagagccgctgtttgggagcgcatgtcttctgatctcaagcctgatcagctgctgaccatcgtggacagggaagtatcattggaagaaacgccgggtgcgttaaaagatattttgcaaaatcgcattcaaggaagagtgattgtgaagctttaacaggatcagcttgcagagaatgttatttttctgcaagcttttttgtggacaggatgatcagctgctgaactgctgtgtcgcgaaacaagattttcctgtaagccgaactttctcttctcattttaaaaataattggtgataatgattctcattccgtgttatactactcttggacatcttaaccatagaaactaccaacaggagagactggaacatatgaaaaaaacactgattattcttacagttttacttctttctgtcttaacggctgcttgctcgtcttcaagcggcaatcaaaacagtaaagaacataaagtggcggtaacacatgatttagggaagacaaatgtgcctgagcatccgaagcgggttgttgttcttgagctaggttttattgatacactgcttgatctcggcattacgcctgtcggggttgccgatgacaacaaagcgaagcagctgatcaacaaggatgtgctgaagaaaattgacggctacacatctgtcggcactcgctcacagccaagcatggaaaaaatcgcttcattaaaacccgatttaattattgctgacacgacccggcataagaaggtgtacgatcagctgaaaaaaatagcgccgacgattgcacttaataatttaaatgctgattatcaggatacaattgacgcttcgcttacgattgcaaaagcagtcggcaaggagaaggaaatggagaaaaagctgacggcgcatgaagaaaagcttagcgagacaaagcagaaaatcagcgcgaacagccagtccgtgcttttgatcggaaatacaaatgataccattatggccagggatgaaaacttctttacatcgagacttttaacacaggtcggctaccgatatgcaatcagtacgtcaggcaatagcgattcaagcaatggcggcgactctgtgaatatgaaaatgacactggagcagctgctgaaaacagatccggatgtgatcatcctgatgacaggaaaaacagatgacctcgacgccgacggtaaacgcccgatcgaaaagaatgtcctttggaaaaaactgaaggcagtgaaaaacgggcatgtataccacgtggatcgtgcggtgtggtctctgcgccgcagtgtagacggggcgaatgccattttggacgagcttcaaaaagagatgccggctgctaagaaataaaagaaaagacaggcaaacgcctgtctttttcttatttgataaagccggataagtggctgttgatattatagtcttttatccgccatttttcttctgcaaattcaatgttgctgaggcaggcgttgacgagacgggtgctttgaagctccgggtcaccgccggatatttctgtcagcagggcgtgaattgccgcaccgtgcgccacgatcagcaccttcttgtttggatacgcctgattcacttttgccaaaccgcccatcagcctgtcagtgagttcttctaaggtttccatattcggatagatgttatctggatagcgctttgtccgttcctccagcggcatgccctccgcgtcgccgtaatcgcgttccttaaaatcatccatctcgactatcggaagatgcagatattcattaataatttccgcggttcttttcgctcttttcagcgggctcgtcacaataatatcccaagaaaagtcctttacatattctccggtttctcttgcttggcgttcacctgttgcgtttagcgggatatcggttttgccttggcatttttgctgcaggttccaatcggtttctccatgtcttactaaacaaacggctgtcataaaatccccttcctgactttattcatatcgctattatactaaatcgaaagcgtgtgtcctatgaaaaagcctatgcaagaacttcaaataataaagcaagtccaattccgccgccgcttccgatggctgcaaccacatattgacagtctgtccgtcttttcgcttcataaaacaatctggttaccagagctgcacctgatgcaccgtacggatggccaagagctaaggcgccgccgcgcacattgatttttgaaaagggaatgccgagttcttgcgagcagacacaaattttgacggcaaaggcttcattgatttcaaataaaccgatatcctcaggtgttacatcgtgtgtatgtaagaggttacggatcgcatcaaccggtgccgcgggcggatagttggggtgaatcccactgactgcgctgccgataaaccggagcacaggcttaagtcccagggctgccgctttttcttcttccattaccaaaagagccgctgctccgtctgctatgccgctgctgttggctgctgtgactgttccggagctggtgtcgaaaaccggctttgcacggggaataatcgcttctattggccgcgttttcaaaaatgcttcgtccgtctccaattccccgagaggaacaatttcttcacggtaaaatcctccatcatgcgcgttcctgctgcgttgatggctgagaagggcgtactcatcctgcatgcttctgctgatggaatagcgtgcagccgtatattctgccgcaatgcccatgtctggatcgccgatggcatctggagaaaagcgggcccgttctgaaaaaggggattggctgctgctttctgagccgcccgcgatatacatcgtgccggctcccgcttgaataaggctgcaggcatagcgcacagcttcaaggccggagccgcactgtctgtcaattgtcattccgggaactgataaaggcagtccggcttgaagggctgacagtctggcgaggttgccgcctctgccggtagcgtttccgagaatgacctcgtcaacttgatcctctagctttcggctgagacagcggatgatgggagctgacaaatcctccggcaggaagggcttcagcagtccgttttgatttccaaagatcgttcgttttgcatcaacaataaccgcattcatttatactgtatactctcttccagccattttttcactctggaacgggcaatttttccgctgctcgtttccggcaagctgtctgcaaacacccattttttcggaattttataggaggctaatttctgtttacacaaggctttcagtgttctggcattagcgtttccatgaatgacagctacagcgatttctccccaatactcgtcgggaatgccaacgacagccgcgctttcaacctctgggcaggcgagaagcacacgttcaatttcttctgggaaaatatttaatcctccgtacacgatcatcccgttttctcttcctgatatgtatagaaagccctcttcatcaacatagcccatatcatccactgtcatccattcatctggtgtgctgccgttcacatagccggaaaaccgcatcgggctgttgacaaatatttttccgacttcgcctggctgacagcgttctccttcagcgttgcggatttcgatccggacattatgaaaagggcggcccgctgaatgcggtttccgtttgctgtcttccggtgaagaaaacgtcacaaaactaagctctgatgtgccgtaaaaatcgtacagcttgagatgaggccatgcagcggcaagcttctccttggattctgccggccagtctgcgccggatgaaatgattttgacgggactgtcgggaaaaccctcaatccttgtgagggcgtctgtcatcgtcggtacggtatagagaacactgatggattcacggcacagccattccttcgctttggcaggagaaaactttttcagcaaacaaacggttcctccgagaaacaaagtgctgactgccccgtataagaagtgagaggacattaacgtcccgggaatcaataccgtgtcatttgatgtaattgaaaaatctgtttctgtacaggtaaagctctctatccatgagcggtgagatcgcgtgaaggccttcggttttcctgtcgagcccgacgtaaatcccatataaaaagggtgctccggatcaatggtaggcaagggatcagcggttgcttcagaaatatctgccatacagttatccagcaaaacaacaggtgtctggctatctgtcagtttgtttttgaaaaaggctaaagtaaccacaagatccgcattgcttatggacagccgctccttacattcagccgggctccagcgtgtgtcgatgggaatggctgtgcaaccagccgctgcggctccggcaaacagctgtaaaaacgccagactatttgggagcaggatcgccacacgattcggcatgctcggctgtgaccgcagccaatttgcggtttgagagacaagccgatcccaatcctggtacgtgatttgctccgattcagtctggatcgctacacggccgggcgatgtttcggcagtagatgaataggtatgagtaattgtcatgtagtgtcatcctccttttgtaaacatcgtatcagaaagagacaaggcttgagtgatttttatcgccagaaatgcagatacagccgcttttatcaaatcaccaggcacatatgcaaggctcatgaaggcggcctgtgacaaatcaatatgcatgataaaagcttgtaccggtataccaagcagataaataaagatgatgccgaatacgatatgagtgaaaaagagacgcaatactgtcaccttccgcagcctgttagcggctaaactgatcagccatgaagcgaggggataagcaatcaaaaagcctgcgctcggtccgaaaaacacaccaaaaccgcctcgtccgccgggcaacagcggcgctccgaaggcgacgagcagcaaaaagacaagctggcttaagatagcagactttggcctgagaatgctgcctgccaacatgacaccaagcgtttgcaatgtaatcggaacgggtgtaaaggataagaagagagggggcataaagccgagcactgccatcagcgcggtgaaaatcgcaatatgcatcatgtcgattaatttcagcatgtgaaatcctccaaacagtaatcaaatatggttatacaataaatgccggtaattattatgtcaactgatttttgatttaagtttacataatgaacgcaaaaaaaccggccgtatggcagaccggtttttgatggttattcttctgtcaggatgacaagcgaatcaacggaagcggccacatgggaaacggcgcggctgacttcctgaagccctccaagaaaggcttgcagatcgacgtcgattttgcctgattgctctttgctgattttcatgctgtggacgatttcatcgaataagcggttaatttgcgtcattttttctttactttcgctgactagctcattcacgtctttgatatgcttggatacaatgttgatttgtgtattcgtattgttcacaagctcagaaacagtagagacggtttttttcgtgtcctcagaaagcttccgcacttcatttgccacgacagcaaagcctttgccgtgttctccggcgcgggcggattcaatagatgcattgagcgagagaaggtttgtttgttcagctatgcctgtgacgatgccgaagattttttcaatttgctgcgcgatttcatccagcttgaccatttctttttcgatttggacaaggcttgtgtcaattttgttcatctgtttttgctggacttctagctctttttttccgccgatcgacttttcttcaacagtgctggatgttacagtgccggctttggatgcttgagaaatgccttcagatttgtccacaagctcttgaactgatctgcttgtttctgaaaacagattggcaatcgatccagaggtttcttgaattttctgatgaagaaggtttttcttttcttcttgttcatcacgggtctggttgtactcgctttgaaacgcttcaaggacaagctgctgttctaagttcaagatttttgttgttgctttaatggcttttagcagttcttgctgatttgtaatggacgcttcataaatgtcaatcattgacaaaagaagctcttgaaacgcacccatataccattttggcaaaaggccgattcttaaatggatggaggcgattcggttacgcttttcaataaattcatcatcgataacgcctgcaaacatttcctgaatatgccgttttaacgtttgttttaagcggtcaactgagctgtgatcattaatgatatccatcaatgagctttcatggtcaaggtttttataaaacgcatcaacgatatttacgatattttcttgaatgagtggctgaagctgctctaacacgtaaagctcagcatctcccaacctgaccattttgagctgttttttgacatctgcatgtttgtttgtgagctgaatgcggtttttttgctgtccgtttgaatctgaaaagtaagctgtttcttgttttctgtcttttttaaataacaatacaatgatcccccttgggaaaaatataatttttactttttggctttttaagcctttttcttttttatcggccaagggaaacatgaatgaagctgcagatgaaaaatatttgaaaaaacgttcattaaaatgaacggtttaatcgagatctatttgttttaatggtttaatggccggaccctctacaacttcgccagatggcttaaagcgtgatccgtggcacggacaatcccacgtatgctcactgtcgttccactcgacctcgcagcctaaatgggtacaagtcgtatcaacgagatggaggcagcctgtctcatcacgaaatgctcccgctcgcctgccgtttatggtgacggctttcccttctcctggcgaaatgtcttcaaattggacatcaggcttttcaagctttccttttatcaaatgcttggcgacatctgcattgtaggaaatcactttctgcaacccgggattcagatggaaacgggacggcgtgaaaatgctttcgtatgggttttcttttttctccacaaggtctgacaataaagtggctgcgactgctgaggacgtcatgccccattttttgaacccggtcgctactagaatattgtcctcattttccgacatcggcccgataaacgggattttgtcgatcgtcactagatcttgggtggaccaataatatggaatgctttcgatgccgatggtgctttcggccagttgtctcagtgtttcataatgtgtagacatggcttttccctggcctgttttatggcttactccgctgaagagaatcagcttttcaccgtttacaaccgtatagcggagcgccactgacggctgatcgatactcaaatacatgccctcgggatactcgatcttcggcttgatggcaaggacataagatctgtcggagtacattctcgcagcatataatccgcctccgtcataaaaagggaagtgggaacagcatatgataaagcggctcttaatggcgtgccggctttttgttaccacttcgggcctttcgccttttttgatatcaagcgcaacggtctcttcataaattcggccgcctttttgaacaatttgctccagaagcgcttttaagtattgaagcggatgaaattgagcttgattcttcatgacaagcgccagcttagaacctaagggaattggaagatccttgataaggtctctttcaattccgagctttgtgtatgcctcatgctcggtgtggattttttgaacagcgttttcatttgccgtataaagatatgcgtcttgctcggtccattcacaatcaatttgatgttcatccacaatgccttttatgtaatcaattgcgttttggtttgcttcataataaagcctcgcatggtttaatccgaaatggcggataaattcgtcgtatatcatgtcatgctgtgcggtaactttagcagttgtatgcgcagtggttccgttaagaacctgatttgcttcaatcaaaacgacacggaagcctctcttcgtaagttcatatgccgttgtgattcccgtaatcccgcctccgataatggtgacgtcacattcagtgtcctcttgaagcgcaggaaaagaaggcaggtcagttgatgttttccagtatgtttcaggtgcttcctttgcaaaatgttgattagccaagccgttatacctccaatcagatttattcttaatttttccatattctatcttttcatacataggaagcaggcattgttcataacataataaggttgaaaaggagtgatttcattggcgaatcaaaaaaagaaaacattaccgcctcagcaccagaaccagcagcctggttttgaatatctgatggacccgcgtccggtttttgataagccgaagaaagcgaaaaaattagagggcaaaaccgctattattactggaggagacagcgggattggacgcgctgtctcggtgttattcgcaaaagaaggggctaatgtggtcattgtgtatttgaatgaacatcaggacgccgaggaaacaaagcagtatgtagaaaaggaaggggtaaaatgcctgctgattgcaggagatgtcggggatgaagcgttttgcaatgatgtggtcgggcaggcaagccaagtgtttccatccattgatatattggttaacaatgcagctgagcagcatgtccagcccagcattgaaaaaatcaccagccaccagctgatcagaaccttccaaacaaacattttttccatgttttacttaacaaaggcagtgctgcctcatttaaaaaaagggagctctattattaataccgcttcaattaccgcctataaaggcaataaaacgctgatcgattattcagcgacaaaaggcgcgatcgttacgtttacaaggtccctttcccagtcgcttgttcagcagggcatacgggtcaatgcagtggcaccgggtcccatttggacaccgcttatcccggccagctttgccgcaaaagacgtggaagtgtttggttcagacgtgccgatggaacgcccggggcagccggtcgaagtggcgccaagctatctataccttgccagcgacgattccacatacgtcacagggcagacgattcacgtcaatggcggaacaattgtgaacggataataaaaagccaatccttgaaggattggcttattcgctctgcttgagcgctgcatattctttagagagcgtaagaaacgcatctttatctttttcgtccaaggctttgttaatttggtccgtcagcatggcaagccgacggttatacaaggattcatcgagcaccatttgaatgtaaatatccgtcattgtgacatcgaattcttttgttttttgcgtgttgcgggacttcatgagctcagtgtacgattttttctctttcataaagaatccccccaatgccttttttatagtatatggataacggtcgaaaaaatcaataaatttttataatttttagacaactaatacttggcaatctatcgacatatcctgcaaaatgccgtaaaccggcaagtcttatgaaagtaaaatcggtttattactagtcatttagtaccgttaaatatcattaaaagatgattttatcttaaatgttaaaaaaacctgtcgttttacaaaaacagatgatagattattagtataaattttgcagaaaaaggatggaggccataatatgagtcagaaaacagacgcacctttagaatcgtatgaagtgaacggcgcaacaattgccgtgctgccagaagaaatagacggcaaaatctgttccagaattattgaaaaagattgcgtgttttatgtaaacatgaagccgctgcaaattgtcgacagaagctgccgattttttggatcaagctatgcgggaagaaaagcaggaacttatgaagtgacaaaaatttcacacaagccgccgatcatggtggacccttcgaaccaaatctttttattccctacactttcttcgacaagaccccaatgcggctggatttcccatgtgcatgtaaaagaattcaaagcgactgaattcgacgatacggaagtgacgttttcgaatgggaaaacgatggagctgccgatctcttataattcgttcgagaaccaggtatatcgaacagcgtggctcagaaccaaattccaagacagaatcgaccaccgcgtgccgaaaaggcaggaatttatgctgtacccgaaggaagagcggacgaagatgatttatgattttattttgcgtgagctcggggaacggtattagaaaaataggaaggagctgaccgaacagggcagctcctttcataaagctatgccgtcggaattcctccggtgatgccatatacctgagatgtcacatagcttgaattctctgaagctagaaatacataaacatcggccaattccactggctgcccagcgcgatttaatggagctggcggcgtgccttgtccgaatttcgggatgttttccgtcggctgtccgccggaaatttgcagcggtgtccaaattggtccgggcgcaactgaatttactctgatgcctttggaagcaagctgttttcccagtccgacggtaaagccgataatggcgtttttcgttgctgcgtaatctaacagcatcgggcttggattatagccttcaactgaggtagttgtaataattgaagctccctccggcaaatacggaagcgccgcttttacaacccagtaaagggaaaagacgttcacttcaaatgttttatagatttgttcagtaggcagatcttcgatgttttcgaccgcttgctgtttgcctgcaacgagcgctagcacatcaagtccgccgagttcgtgatgcgactgtttgactagatcttggcaaaaggattcgtcgctcaagtctccggggatcagcactgcttttcggccttctgcttcaatcagctcttttacctcttcagcatctggctgttcctcgggcaagtagttaatagccacatcggcaccttctctggcgtaagcaattgcggcagcgcggccgataccggaatcgccgcccgtgacaagcgcttttcgacccgttagtttacctgatcctttgtagcttttttctccgcaatcagggacaggtttcatgttcttttgcaggcctggcggttcttgatattgttcgggaaattcatcatgaaaaaatgcttttataggattcgtaagatttgaatcagacatcagcaacgctccttttctgtttggtgtacattcgtatgtgtacccctgagcataagcagaaaaacatgttttggcagtttgaatagtgaaggaaaaagaaaacaagaaaaaacaaagccttcttccatatttatcttgtcaaataagactatatgaattatgataaattcgagctataaatcaactaaatattgggtgttgggagagtgaatcgtcatgaaaaaagcggcggcggttttgctgtcactcggtctcgttttcggtttttcatacggagctggccatgtggcggaagccaaaacaaaggtgaaggtctataagaactgcaaggagctaaacaaagtatacaaaggcggagtggcccgcacatcgaaggtgaaaaacaaaggcggaaaaacgaagtacaagccttacgtttctaaggcgctttacgatgccaataaaaacaaagaccgcgataaagatcttatcgcctgtgaacggtaaataagaaaaagcaatctggtgtccagattgctttttctattgcttaagccgcctgatcggccgcagcgcttttcgccttccttgtcataaggctgactgccatcatgaccgtgatattcaaaagcagggcgacgatgccgacattcaagtcttttgcggcttgcggcagagccggaaataaagtgccgatcgtcgtttccgtcattgtaatataagtaactgctccgacacctgcaataatgccggcgaaagctccttgctttgtcaccatattatgcttgagcaggctgaacaaaagggcggggaatagctgtgtgacaaggctgtagcccatcaaaagcagcgtaacgatggtattcccgcctttgaaggtaaaatacaccgaaatcagcgcaatcaccggcactaaaaacttagcaagcgccgatacttgctgttctgtcgtgcggggcgcgattaccttgtacacattttttgcaaacagtgtggaggcggacattaagatcatagaccctggcacaagtgctgtcagcagtccggcagcaccgataattccgacaaaccaagggtcaaatgcttgcagagacagtctcaaaagcgacaaatccccgtctgcgccattcagatctggaacttgcaggatagccgcaaagccaacgaaaagaacgaagagcaggaccagctggtacaaaggcatgatgatggcgtttttacgaaacacttttgggttttcggctgaatacgaagcggaaaacgtgtgaggccacatgtaaaaaccaagcgctgtcaagagtacggttgaactgaaccaggccacactttgtcccgattcggggagcgtaagaaagccaggctttgccgtttcaatctgctgaaacatgtcttgaaatccgccgtagtaatgaattggcaaatacacacctaaaaacagaacgacaaccagaatcatgatgtccttcacaaccgatatccaggcagacccgtgaatgcctgaaaccataacataaaccgtgatggaaacagcgccgatccagatggcggcggtcggggtgattttgccgtacgaggtttccgatacaatcagcccgaggcctttcagctgcagtacaagatagggaatgagtgcggcgatgccgaccagtgaaacgagaatgccaagcagcggactgttgtatttttttgtgaaaaaatcagactgcgacattagtttatgctgtttcgcgtacgtccaaactgctggaagaagccagtaagaaaggatgtaggccagacatccgtaggcgatgatataaaaggctggaccgccctttccgtaggcccagccgctgccgccgagaaacgtaaaagtagtataaatttcgcctgccatcaaaaggaagacgaacacagttccgaagccgcgccctccaaccgtccactgctccaggttcatgtcttttcctttttgggcgcgtataccgagaaaaatactcaagagcaggacaccgaaaatgatgatgagagctgcattcattctgcttcctcctttttattttccttgtcgaggacatacacaatcgccatcagcgcagaggtcaaaagagcccacatcacaatataggcaagaataaacggcatgccgaacacgtagggggtcaccttatttgcaaaagggatgccgagtaagataccgataaagggcaaagcggcaagaacgtgaatcagtttcatagaatcctccttctatttaggattggggtgtacaagcccaagcgtactgaaaatgatgtcgcagatatggcagcacatgtcactttttagggtgaaaggctgtggttcgaattataaataaatttattttgtttgtatagtgtgaattgtctgaaattaatgctctgaatcgcccgaagagggaacgggcagtatgattcaaaaggctcggagtctgtccggggcaaatagatagtatgttaataattcgctgacctgctcacggattcgcggattaaaatagcgatggttttcttcataaccgtcgatgacaaatgtatagagcgtaaaggcttcatcgcgttccgtctcgcggattgcaatttttcttttcctcagttcttttctgacctccatcaaatccttttgtgctatttttaatgattcgctgataagctgtttataaggatgcttcaattttaatgtgctttcttcaattccggcgagatcacggttaaaaatcgtaatggccatgggcaaaaagagagcccgttcaattaaatcgtatatttcctcctgcagatttggcatgttgactccttctttctaagggaacgtttgttctatttgtattctatatcggctggtgaaatgtttcaagacagaaaaaatcaccaaaactttttagttttctgctgataatgtgtagaataaggatagacaaacccggtaaggagtataaatgttggagcattttttatcctatttgacacaagaacatttaactgaattatttcaaagctatagggctttcggtccgctcatagctgtgctgctgcctttaattgaagcatttctcccgtttttgccgctgatcgtgtttgtggtggcgaatacgaactcgtttggcttgtgggaaggattcatcctgtcttgggcgggatcaactgctggttccattctcgtatttttgattgtccgtcaatacggacagagaaaattgcttggatttatccgcagtcatccgtctgtaagaaagctgatgttatgggtggaaagacacggcttcggtcccatgtttcttctgctttgttttccatttacaccgtcagccgcggtgaatgttgttgccggtttgtcaaggatcggaacgcggccgtttattttggcggcagcctcggggaagcttgtcatgatttttatgatcagcttcatcggatatgatctgcacgcgctgattacacagccgattcgaacggtcatcgccgtattggtgatcactgtcttatggtatgtcggcaaaaaggtggagcggtatctgcatgtaagagccagtcagcgtgagcatgatggagggagacagtaacatgaaaaaacggttttggtttcttgccggtgtagtgtccgttgttctcgccattcaggttaaaaatgctgtctttattgattacaaggtagaaggcgtcagtatgaacccgaccttccaggaaggaaacgaattgttggtcaataaattttcgcatcgatttaaaaccatccatcgttttgacatcgtcctttttaaaggccctgatcataaagtgctgattaaacgggtaatcggcttgcccggtgaaacgatcaaatataaagatgatcagctgtatgtgaacggaaagcaggttgctgagccatttttgaagcatttgaaatctgtttctgccggcagccatgtaacgggtgatttttctttgaaagatgtgacgggaacaagcaaggtgccgaaaggaaaatattttgtcgttggagataatcgcatatacagcttcgacagccggcattttggtccgataagagaaaaaaatattgtcggtgtgatttctgatgccgaataaaaagacgctaatggaagaggcgtctttttgtatgccgtttggaaaaatgtgttgaagaaaaatttgtaaggagctataatcaaaattgttacctgtgtaacaaaatttatatattttttgattggaggtccgtttttattggtttttgttcgttttgtatgaaacaaaaggagtggtgaatgatgatgaaatatgaagcagtgattataggaggagggccggtcggatttatgctggcttctgagcttgcgatggccggagtgggaacatgtgtgattgaacggcttgaaaaacctgttccgcattccaaggcgttgacgctgcacccccgaacgctggagcttcttgagatgagagggattttagagcggttcgtatccaagggaagcaagatacctaccggacatttttcaatgctggatacccgtctggatttttcaggcttggatacgagctgtccttacacgcttttgctcccgcagtcaaaaacagaaaagcttcttgaagatcatgcacgaagcctgggaacagaggtgtttcggggtgccgaggcgctggcggttacggaaaacggggaagcggtccaaacaatttttaaggatcgggacggcagtgtacggacgatcacaagcaagtttgccgttggtgcagatggcgccggaagtaccgtccggaaacaggcaaaaattgagtttccgggaacagacagcactgtcaccgctgcgcttggggatgtggtgctcctttctccgccgccgtcaggcgtgctgtccctttgcacaaaagagggcggtgttatgattgttccgttatcttcagaccgataccgtgtcgttgtgatcagtccttatcgcacacaaatgccgaaagatgtgcctgtgactgagaaagagctgagagctgatctcctgcgaatttgcggaactgacttcggtttaacagacccttcgtggatgtcgcggttcgggaacgccgcgcgccaagcgaaacggtatcgggacggcagaatctttcttgcgggtgatgccgcgcatattcattttccagcgggcgggcaaggactgaatgtcggccttcaggatgcaatgaacctcgggtggaaactggcggcggccatcaaaggctctgcgccttcttggcttttggacagctaccatgacgagcggcatccggcagcggaagggctcctcagaaacacggaggcacagacaaagctgatcgatttcactcaagcaggcctccatttgcgaagcatgatgtcggagctgctggccttccctgatgtgaatcgatatgtagcagggcaaatttctgcactcgatgtcagatatgaagctgatcgtaccatgccgccgaatcgtttgaacggggcacggctccctgacatgaagctgattctttccgacggcagttcggaatggctgtacagctttctccaaaacgggtcattcgttttgctgtcattgaggcaggaagctgatgagcatatcgaagtgaaaggcttacgtacggtaaccgcctcgcttgcagaaccgaatgaaaagttgcgggatgtgcataccatattggttcgtcccgatggacatgtagcctgggcggtggatgcatcagcgcccgattgttccgaggtgattcaaaaagggatcagccgctggttttccgtcaccagccgagtataattcaattcgattgtttcatctgtaacaaaacggtatgatagaagaaacaatcgaatgaaaaaggatggaaaacccgatgaacacagatcatacgaaacgcaatctttttgaattgtatgcggagctcattcatcaacaggagaaatgggaggggcttattaaagcctttttatctgacgaattgaggaagctggatgtagagcacgggagtaaatctcaattgacgatgacagaaattcatgttctatcctgtgtcggggacaatgaaccaattaatgtcacgtcgatagcagaaaaaatgaatacgacaaaagcgactgtatcacgcatcagcacaaaattgctcggcgcaggcttccttcacagaacacagctcagcgataataaaaaggaggtctacttccgattgacgcctgctggaaaaaagctgcacagtttgcacaaatattatcatcagaaggctgaacagcgttttctgtcattttttgaccgctataccgaggaagagattctttttgcggaacggctgtttcgggatctggtgacaaaatggtatccgtcgtcagaagaaattgaaggggggcttcctagcatttttaaataaaaaacacgcactgaggtgcgtgtttttcgcttttttctatcttgttcaaggctgtaacgtaaatcagatttcatcttgaagaatgaaattcaagatgttctggaatttgcactgcttatacgatatgtctattagtatctttattttatacgttttttactgtgtttttgatgctttgttttcaaatgaaatagggtcttctgttttagttctcctaatctttacagaaatacctactagaatgaccgccatagttgtaaatattcccatggttaataagatcgtatcctgatttaaactccatccaattaagaaagagatgatcgctcctccgaaacttgccgaagcaataaataaacttgtaacttcgtcaacgtacttctgaataatgattgatgctagtgttaaagcaatgggaaatatgcccgctatacttaggccaatcaaaaatgtaccgcccaattgaagtattgggttacttatataagagaaagcaatcaacaaaacaattaaacaactacagctaaaaaggaggtatttagaaaaatcaagccttctacttacgaaaccaatcaatattcttcctatgatgatccctacccagaaaaaggagacacttataagactaatttgttcattgtcttggtttatcatgattgaaggtaaaaagttggcaaaatttgtttcaattccagcatataggaaagcgaaaaatacaaaaaagcctaattgctttgatttttttctatctcctataaagtattgaaatgctcctccatctggaaaggtcacttgttggttagcattcttagcgtactctcggttcttagacaagaaaattaaccaccctacgaataggacgaataaaaaggtgaatatacagtaatacggtaaaaaccagttattgatatctatgaaggaattaattaataatgggaaagataaagcgcctaatccaaagagaacttccagcttactcattttttctgcattactttcgaaattagcaataacaaatgaaccaactgtcgtttctaatgtgcctgccccatatcctaagagaaaagccattacaacaatataataccaatccttagttagaaaaaagatacttaacgctgcaagcattattgtcaaagctaaagtaagtgtcctaaaatgactgtatttcttaatcattaacggtgcgattaatactccgcttagaaatccggtaaactgaaagaagattatgaccgaaatatcatctgttgtcttgttaaaagactctaatagaaatggtgtcaaactccctgttgatatatggataatgcctactgtaaaaaagaaagcatatccaaataaatatgtccctcttaacattcattacacccctatatgaaaaagcaggaaaataaattcctgcttttttagtaacttctctcttcgaaatactagttgactgctgaaacagacattggttgagagttgctgtctttctcaaagaacatttctaatacttcctgagatctaaaaccatcactaaaagaagggatctcaacccaatcattctgagttgatgcaatccaattgattaactcgcttctaaaagaatcagcccatccataaaactcgtttggcggatcgtttaataggctttgcggtactgggcagtctaccacgttcaagccatctatgagcttgtaaacgtgaggattacctgtgtggtatttaaactcttttttgtgtccaactacctcaatgctaaaaccacagtcttcaggtacagaacattttgatgtgatgatatttacaaataccttgttcttcagctggccataaatttctgcatagtcatctacgagtacctgtttatcctcttttgtttttacatttgtgttcatttttgccgttactgattctgtgatgaaatcactctcaaacaaataccataccatgtcaataaggtgaatacccagatcccccaatgatccactcgtcttcttactgttagcgtcatctctccaagtaaacttcttacgcctaagtgcactatttttcttgaagtgtacttttatggacagtatgttacctagttcattattgataattaagctttttaagatatttacgtaagataaatatctataattaaatcccatactggctcttacgctcaacctttcagcagtatctttcattatgcttgcttcttcaagagaaatagccataggcttttcacacaaaacatgcttatgttttcctaatgcttgcaaagcatgttctttatggcaaaagtttggtgatgctacaattaaaccttctgaggcatcaattagttcatctacgttttcaaatgacttcccgccgaaagttttcacaaagctttccgcattttgttgatttatgtcatatacccctactaactctgcattttttattgtagataaagcagttgcatgcgctcttgcaataccacctgcacctatgatgcctatcttcttcatttttatttcctcctcatgatccaattaatttttttaaggtattagtaattccttttgagtactcactatcagttataaggtggtgcaagttttttgcttcctgtgttgcattttttagcagatatccattccctactgtctgtaacatacgaacatcatttccactatccccaaatgcgatagctctttcggtatttaggttgtatttctctaacataaacgttacaatttcattctttcctgtccctgtggggataaaatctacatcatagctgtcttctggatcgcctgctaagggattacaccgatttatatttactgaaacgccgtattcctcgcagattttttcaattgctaataggtttttcttgtcgtttatttcatcttgttcctgatagtagaagttatgcttataccgtgactttcctaattgagtttgaggattcaaaagaatgttatgattttcatgtagctgtttcacaagtttttcaaccttttctttactaaacccttcattaatgcgactgttccacttgttatcttgctgaccgaagttatgctctgaaaagtacgtaatttcagttccaagatcactagctataaaatgcggaaaatatctaaattttcctcttcccattttatcgagaatagattctatactgctcccagtaacccatccgattattagcttcccatctttacttttttgttctagatagtcttcgagttcatagatgtcttgttgcttttgttcgtcgattgtatgcggaaaatacgtttcatcaaaatcacaaaaaacaatatactgaggatgttcaaccgtggataacgttttatactccgatttcttgcttaataacatgaaacagtccctccattactctgtcttgttcttctaaagtaaatgacggatataaaggcaaatgcagtacctgactatgagccttttccgtatgaaccaattggagtcctgcatacttgtcctgtactaaaggagttttttgcatatgagacagtattggataatatacatctgtttgaacaccaaaatcttcatttaatttagtcatgatatctgcccgatcttctgttcttaccttaataggaaacagatgccatacatgatcttcacttaattctggtaattcaatatagcctttattctgcaactctgctaattgggtaatgtatctatccgccaagaacaatcttttgaagttgtttaatgaaaggtacttcattctctctaaaccaattgctgcctgtaaattgtccatttttgaattaaatccaaaattgatgactttcttattttttacatttacttcaaaaccgtgataactaaattgaatgcattttttagcgagttcttcattatcagttgctattgccccagccttgccacatacaccaaaattcttatagggattaaaacttaatgtagtgatgtctgcatactttcctaagtctgtcagtccaattccttggcaggcatcttcaattactttcaatttataacgatttgcgatttgacgaatatgctgcatgtctgaatgttttccgtataaatgcacaggtagaataaactttgtataaggagttattgcttcttcaattttgtcaggatcgatgcagaatgtttgtgggttaatatctacatagataggaacgcctcccaaagctaacacagcattttcagtagctgaaaagctattagccggcatgataacttcatcccctgggtttaatcctaaagccaataaacctatcataatagcatcggttccactgctggttgcaattacataccttttatgtaaatatgtagataaaactttttcgaattgctctaaataggaaccactcgtaaattttccagttggcaaaacttcagttaatgtatttaagatatcttccacttcatcattggttattaatctgtctacaggcaaaaaagggactttactgatttcacgatttttttgatagttgaaaagatcatgttcaatatctatcttttcttttaatacttgtttccaccgctcgtttacaatactgtcttcaataacaagttcttttccttgtacgtcaccttttaagtgttttaatagtgacatgttttctttgcttttacctgaaatcttaacctgtttttgcatgaacagtacctccaatgattttataatctaaaaatttattacaaatttatcctagtttctgaaatcggtaacatgtcaacaacttttttaaggaagggaaaatatgcctacaattgatgaaatagcaaaattatgcaatgtgtctaaaaccacagtgtcaagagtattgaataatcatccttatgtgtcgaaagaaaaaagagatatgatcttaaaggctattaacgaacttgactacactcccaattatttagctcggaattttaggagaaataagacacaaacgatagctttatcggttccgagtatcgaccatccattttttgctcaattaataaaaggggtctctcatgaagcactgtttaagaattacaaggtaattgtatttcagaccttttatgacaaacagacggagctagaattactagagttattgaagcataaagaagtggatggcattattcttgggactttagaaaatgaatgggatcagatatcccctttcttaaagtatggtcctatcttattatgtaatgaatatcatcactcagcggacatcacgataattgggtatgatgaatttgaagctacatacatgggggtagtacatttaattgaaagagggcataaaaaaattgggttttgttttgatactccatatagcgaagctcaatgtcagaggaaagagggttatttgaaagctttacaagattacgatttacatcatagaagcgaatggatattcggcgaaatgtttaatatcgaggatggctttcgtgtttttcataagataaaggatctaaaggacagaccctcagcaatatttacaggaaatgatcaagtcgccgcagggattattaaacaggcgatgaaaaatggctttaaagttccagaagacttagctgtaattggttttgacaaccaattgatctgccaagtcgttactccgaccataacaacaattgatatccccgtaatagaattaggtcaacaggctgtgttgaaaatcatcgagtccatttcgggtaatgccactttaaacagaagaattattaaactgccaacaaagcttattataagagaatcaacgtaacgatagatttccctttatcattttatatctttatataagaaaaagaggttattcattttaacctctttttcaatcgtaagtcgtcaattatttctttcatttcaccctctggcagcattcacttcaaacctgatccattaacaacgaaatatccgcttatatttcctcatctcgatggtttgcgaattaaaagttcttgaacccttttttcaactaggcactactgccgctgattgagctctttttgtcttttttttcaccatgaagatggtgaagcaggcgataaaacggcggcagcagggcaataaccagaatgacgcgaatgacctgaaccgcaacgacaaaggtggaatcagcatgtaaggtaacagacgtcgtcgccatctctgcaatcccgccgggcgcaaatgccagaacagaagtgatgagcgaaattcctgtcagctcggaaacgatcacggcgctcaaaaacattgctgcgattaaaccgacggacgagacaaacccgacgatgataatacgggtgacgccggcaaacatgcttttatacatcttagagccgatcgttgccccgagaaatacttgtgatacatggttagcttgtgacggccaccatgccgtcatgtcgtgccctgtcaccgcagctccgccaacatgtacaattgctacaccgagcatgctgccgagcagccatggagctggaaattttaaaaatttcgcagctttgcaagctccccaggcagcgagaataagaatgacggtccacaaaacgggagcgagcctaaaatctgtcgttgcagaagaaatcgtctctgctgcggcacttgcggtacgatcttgttttgtatagatcagaatgactaaaaacggaatggaaagcaccacgagcagcacacgcatcatttgaacgaggctgactattgcggtattggcgcctacttcctgtgcgatgctcggcatggcggaaagcccgccgggagcggtgccgacaaagctagtcatcatatccgttttgctgaaacgccaaagcacatatcctgacagcatggccagcaggatagacaatatcagcataacgccgactgaaaaccaatggtctttgagaacagagagaacggataaattcagcttttggcccaattcaatgccgaggatcatctgcccgagggcgagccatcgtcggttaattcctttttggtctggtgccatcatcagccatgccggccgtatcatggcgaggcagcaggcgacaatcagtgttccgatcatccatccaattgatattccggttaatgaaagaataaaccccccggctgcactgattgcgataaaccatagatctttgaggagattttcgtctttcttcaatgtaaaacccttcttcctttttcacgtaacactccaattgttcacgtagtgaatgtatttattactatagtatatttttgttgataaagaaattatgaattattttctataagcgattcacttttcttatgaccttgtgttcgagcttttctattgtgtaagtcagagataaacccgctgtcagcagacacacggcaagagcgtaaaaaatcacttctccgccaaatgatgtcaggatcagcccgcctgccagcggtccgattgagcgggatatatcccaatgcagaccatagacagcataaaaccggcccagcaaatgaggcggcgccaatttcgatatgaaggtctggatgtgggttagcccgatgctttcgccaaccgtcatcaccgctgccgtcactaaaagcattgtcagggaggttgagcatgcaaaaccggcagccgcaagggagtagcaaatataagtaatgaaaaggattgttttcattgaaagcttttcggtccctttgacaagaggtacttgaagaacacagctgaataaagcttttgctgctgaatagatggtcagcatggacagataatcagaaaacatgtttttgctgaacagcctgtatgttgtttctgattgtgcatataacatgctgatggggagagaaagcagcaaaagaagcaggacaggcctgtatatcgtaaagctcgcggacattttcggggtaacagctgggtgtagcggctttgtctcaggcagtttcagtgcagcgatcagaaagtagataaacaatgccgcagcatctaatgcgaatatccacacggggttatgattgtacagcagcatccccactagcggtcctgccgtcagacccgctgaatagatcgcattgatgaccgcaaacacttccgaacgtctgctttccggcgtgctttcagcgatttgggcgcgggaagcgggaatgtacaacgatcttccgatgccattcatgacatagagaatagcgaaaacatacgcatgctcagcaaatataaaccctgtcattgccgctgattgaagaagcaatgcggtcaaaatcgctgtgcgccgcccaatccggtccgccgcctttcctgcagcgagcgtcaggaaaatatcagcaaatggctgaaggctgatgatcagcattggcatcatgatactgccgtttaattgttcatgcagatacagcaccataaaaggtcccatcattgcacctgtcaggcttgtcagcaattcgccgaaaaagcggagccgaacgggagcggtatatctcgattttatagagtgaaaactggtcaacatgtgatcgccgcctttcgctgtttgatatagtagtagtgtatagaaggggcggcggcccaaaaagtgaagaaaagaagagataaaagttccccttttgtcgggaggtgcggggattgaagctgatagagcactacgtggcgcttgtaaaaacaggctgcgccgagtatggacaaatgaacgaaatgacactcactgagattgccgactgtttattttgtacagaaagaaatgcaaagctcattttacataagctggagaacagcaattggattatccggaaaagcggggcggggcgcggccgcaaatctaaaatcgcgtttcttcggaggcctgaggaactgcttcttcaaactgcaaaggaatataccatgtcaggaaagcttaaaaaggcaaagaagctgcttcagcagtatcagtccgcgtttccggggcttcaaaacgaatataacatgtggctttcagaggtattcggatttgtgacggagacaggcgagaatggggcgaaggatgttctgcggctgttcatcacgcccgaatctgtcagcagtttggatccatgccaaatatttttgcggtctgagggccatttcgtcaaacagatatttgatacactcttcacgtttgattcggatatgcaggagccaaagcctcatttggttcatggatgggaagaggtcgaaaaaaaacaatggagattttttcttcgaaaaggtgtgtcatttcataatggacagccgctgacatcgcgggacgttgcgtttacgtttcagcgctttttggaactgggtgacaacccgtataaatggcttctgcacggagtgaaacaagtcttagaaaagggcccttattgtgtggcgctcatactcgataggccgaatgcgcttttgccgtatgctctttgtgatgaacggctgtccatactgccggcagaacagggcggcgggaaaaatggaacagggccttttcaggtgaatcagcaacacagcgggatgcttgtgcttgaagccaatgagcgctacttcaagggacgcccctatttggatcgcgttgagtttgtgttttctgagcaagccggagagatgaacggttttaccattcaagaaaaacaaacatgtcctgagcagcaaactgtttttgatgagcggcatgttcagtatttgtcgctcaatctgaaaaagaaggggcctcttcagcaccaaagctttagaaaagcgctccggctgctgatttcctctgaacggctcgttcgtgaagcgggagggcaccgaagaatcccggttacgtcctttttgcatccgagttcttttgagtgggagggcgtttcgccatctgaattgttgaagaaaagcggttacgagggcgaaacaatcgtgctttataccttttcggaaacggatcatcgtgaggacgccgaatggattcaaaatatttgcgcccagcacggtatcaggcttacacttcaattctgtgatgctgctgatctgcgacggccggaaaccgtgcagatggcggatatcattcatgacagtgcgacgttttatcaagacagcgagtttggttttctgcatttgctgctgtcggagaacagtttcttgtatcagcatctatctgaaaagctgacacagatttgctcaggaatgatagagcggatgttttccatgcctgatcgctgttcgagaatcaacatcctgcgtgacattgaccggcagatgatacaggagctgaacgcgatcccgctgtatcaaaatgtgctccaggtgacatcaagtaaaaatgtaaaaggcctggtgcttgatgaagagggatggattgatttgtactccgtatggctgtccaaataaaaagagggttcttttttgaaccctcttttttaaactgccatgctgcggcattgttcagcacaggcgaagcaggctttcgcacatgcttggcaatgatcatgatcgtgctttccgcattcagtgccgcatgcttcacaaatatcggcgcaaagtgcacaaatttctttcataaacgggctgtccgtttgcatggctttgaccgccagcgcgcaaatatccgcgcattccctgtcaagccggatgcagccgctgagatgatgctgcacgctttcttgcaagcatttagtgaaacaatgattgcaagccttcatgcaatcgatgcaagcctcaatacaagcttcagaatattgctccatggttgattccccctgtatgacagtatatggttttatgtttcccggctgcatttgaaaaaaacaggggagtgtgtttttagctaaggggatatgtacatataccctgaacgggtatatctaaccatcagatagtataggaaccagacagcgtgattttgttcatcacgtgctgcgcgcgtaaagacgcctttcgcttttaagtttgacgtttcctcggccgcacgcaagtaaaagtcgacggtttcttgttcatctttaaaagcggcatccagtcctcttgtgaaattgtccgggcattcttccgtttgtttcggcatgatgtgtttgccggtaattgaaccatacagtgtggaaaattcacggaggtggcgaatctcgtcacgcctgatttcttcaatctgttttctgacctcatcgctgtgggcgagttcggcgagcttgcggtagcattgaatggcactgaattctccgttgatggccttctgcaaatttcgaatcaaaacaggatcttccctgtatggcaccggatagggatagtagctgtaatgcaaggggattcaactccattcttaggaattgggcttctgtaaaagtatatgttgggcagggagagatgtgcggagataatcagctttttatatgtgaaaaggccgtttttaccaatagatcagattggtcattttcgtcaacattcgataaaatatatagagataaaaagagaggggtcttctaatttgggagcagagtttttagtaggcaggtccgggagtggaaaaacgaagctgatcatcgacagcattcaggatgaattgcgccgggctccattcgggaagccgatcatttttctagtcccggatcaaatgacgtttttaatggaatacgagcttgctaaaacgccagatatgggcgggatgatacgcgctcaagtgttcagtttttcacgattggcctggcgcatcctccagcatacgggaggaatgagcaggccgtttctgacgagcaccggcgtacaaatgctcctgcggaagctcatagaggagcataaacaggagttcaaagtctatcaaaaagcgagtgacaaaagcgggtttaccgcacaggttgagcggatgctgacagagtttaagcgctattgtctggaaccggaggatatccgccggatggcggaaagcggaacggcttccgagtatcgcggagaacgtgttttatctgaaaagctccatgacttatcaattctgtatcagcaaatggaaaaaagcctcgcagatcaatatcttcactctgaggattatttgacattgctggcagagcatatcccgcttgcggaagatataaaaggcgcccatatctatgtggatggcttttatcagtttaccccgcaggaattcagggtgttggagcagcttatggttcatgcggagcatatcacgttttcgctcacagcggacaagccgtcatatgagcgggagccgcatgaactggaattgttcagaatgacggggaaaacctattaccgcctgcatcagaaggcgaaggaactgaatttggacattacgtataaagagctgagcgggactgagcggcatacaaagacgccggaattggcgcatctagaggcacagtatgaagcgcgtccggccattccatacgcagaaaaacaagaagcccttactgtgatgcaggccgcaaacagacgagctgagctggaaggcattgctcgggaaattcacgccctagtcagagagaagggatatcgctataaggatgtagcaattcttgcgcgccagccggaagactacaaggatatggtgaaggaagttttcgcagattacgagattccttatttcattgacggaaaagcatctatgctgaaccatccgttaattgaatttatccggtcgagccttgatgttctgaaagggaattggcgttatgaagcggtgtttcgctgcgtgaaaaccgaactgctattcccgctcaatgaaccgaaggccaaagtgagagaacaggtcgatcagctcgaaaattactgtatcgcctatggtattaaaggcgaccgctggacaaagggcgatcggttccaatacaggcgttttgtgtcattggatgatgattttgcgcagactgatcaggaaatcgaaatggaaaacatgttgaatgacacccgcgattggattgttccgccgctttttcagcttcaaaaacgcatgaaaaaagcgaagacggttcaagagaaggcggaggcgctctatcgttatttagaagagacggatgtgccgctgaagctggatcaggaaaggcagcgtgctgaggatgacggcagaattattgaagcgcagcaacatcagcaggcgtgggacgcagtcattcagctgcttgaggagtttgttgaaatgatgggagatgatgagatttctcttgatttgtttcagcaaatgatagaagccggcgcggagtcgcttacattttctctaattccgcctgcgcttgaccaggtgtttgtcggcaatatggatttgtccagaatgtatggcacctcctgcacctttgtgctcggggcaaacgacggcgttctgccggcacgccctgatgaaaacggggtcctgtcggatgacgaccgggaatggctgaaaacgattggggttgagctatcctcaggcggacgagagcgtttgcttgatgagcacttcctcatctacatggcgttttcaagtccgtctgaccggctttacgtatcgtatccgattgctgatgcagaaggaaaaacgcttttgccgtcgatgatcgttaagcggctggaagaactgtttccgcatcataaggagcgcctgttaacaaatgaacctgaacaggtcagcgatgaggaacagctgatgtatgtcgtgaataaaagcgtggcacagtcctttaccgcgagccagctcaggttatggacacgggaatacgacatcagcgacgtctggtggagcacgtacaatgtgctgatgagtgagccggacaggctgcagtcgaaaaagctgttctcaagcctgtttttccggaatgaagtgaagcagcttgaacgcagcgtgtcgagacagctctatggtgaacgcattcagggcagtgtatcgagaatggaaacctttaacgcatgcccgttttcccattttgcgtcacacgggctgcatttgaaggaacggcaattcttcaagcttgaagcaccggatatcggccagctgtttcattccagcttaaagctgatttctgataggctgcgtgagcaaaagctggattggcgcgatttaacgaaggagcagtgcgagctgttttcctatgatgcggtagagcggctggcaccgaaactgcaaaaggaaattctgctcagctcaaaccggcattattatgtgaaggaaaaactgcaaaaaattgtgacacgtgtgtccggcattttaagcgagcatgcgaaagcgagcggattcgtaccgatcgggcttgaactgggctttggaggaaaagggccgcttccgccgctgacctttcaactgaaaaacggctgtacgatggaactcgtcgggcgaattgaccgtgttgataaggctgaaagctcaaaaggcctgctcctcaggattgtcgattataaatcaagcgacaaaggccttgacttagcggaagtatattacggattggcactgcaaatgctgacgtaccttgatttatcgattacacattcagctgactggctcgggatgagggcgacgcctgccggagtgctgtatttccatattcatgacccgatgattcaatctaatctcccgcttgggcttgacgagattgaacaggagatctttaagaaatttaaaatgaagggcttgctcctcggtgatcaggaagtggttcgcctcatggatacaacccttcaagagggacgttcaaatatcataaacgccggcttgaaaaaagacggctctctcagatcagactcagcagcagtcggtgaaaaggaatttgatcttttgacaaagcatgtgcgccgcaccttccaagaagcgggcgaacaaatcaccgacgggcgcgtatccattgagccgtacaaaatgaagaacaagacgccgtgcacatactgtgcgttcaaatcagtatgccaatttgatgaatcactggaagaaaacgagtatcgcccattaaaggctgaaaaggacaagacaatacttgagtggataaaaaaggaggcggatggcaatgaacattcctaaaccggcagacagcacatggacagatgaccaatggaatgccattgtttcaaccggccaggatattcttgtggcagcggctgcgggctctggtaaaaccgctgtgctcgttgaacgaatgattcggaaaatcaccgcggaggaaaacccaatagatgtagaccgtcttctcgttgtgacatttacaaacgcctcagcggcagagatgaagcaccgaatcgcagaagccttggaaaaagagcttgtacagcgccccggctcgctgcatattagacgccagctgtctcttttaaaccgggccagcatttcgacgctccattccttttgcctgcaagtgctgaagaaatattactacttgatcgatcttgatccgggctttcggatagctgatcagacggaaggcgagctgatcggggatgaagtgcttgacgagctgtttgaagacgaatacgcaaagggcgaaaaggcgttttttgagcttgttgaccgctatacgacagaccggcatgatctggatctgcaatttctcgttaaacaggtgtacgagtattcccgatcccatcccaacccggaggcgtggctggaaagctttgttcatttgtatgatgtatcagaaaagagcgccatcgaggagctgccgttttatcaatatgtcaaagaagatattgcaatggtgcttaacggggcgaaggaaaagctcttgcgcgcgcttgagctgacgaaagcgccgggcggcccggcgccgcgtgctgacaattttcttgatgatcttgctcagattgatgaactgattcagcatcaggacgatttcagtgaactatataagcgggtgcccgccgtctcttttaagcgtgccaaagcagtaaaaggggatgagttcgatccagcgctccttgatgaggcgacagatttgaggaacggcgcaaaaaaactgcttgaaaagctcaaaaccgactacttcacgcgaagtcctgaacagcacttgaaaagcctagccgagatgaagcctgtcattgaaacgctcgtacagcttgtcatcagctatggaaaacgattcgaagctgcgaaacaggaaaaatcaatcatcgatttttcggatttggagcattactgtttagcgattttgacagctgagaatgacaaaggtgaacgtgagccgagcgaggctgcaaggttttatcaggaacagtttcatgaggtgctcgttgacgaatatcaggataccaacctcgtgcaggaatcgattctgcagctcgtcacaagcggtccggaggagactggtaacctgtttatggtaggagatgtcaaacagtcgatttatcgattcaggcttgcggagccgcttcttttcctctctaaatacaaacggtttacagagagcggagaaggcacggggcggaaaatcgatttaaataaaaatttccgaagccgggctgatattttagacagcacaaactttttatttaaacagctgatgggcggcaaaatcggtgaggtcgattatgacgagcaggctgagctgaagcttggtgcagcgtatccggacaatgacgagacggaaacagagctgctgctgatcgacaacgcagaagatacggatgcaagcgaggaagcagaagagcttgaaacggtgcagtttgaggcaaaagccatcgctaaggaaattcgtaagctgatttcatcgccgtttaaggtgtatgacggaaaaaagaaaacacatcgcaatattcaataccgagatatcgtgattttgctccgttcgatgccgtgggctccgcaaatcatggaggagctgagagcacagggcataccggtttacgccaatttaacgtcaggctatttcgaagcggtcgaagtcgccgtcgcgctttctgtgctgaaggtgattgataatccgtatcaggatataccgcttgcctctgtgctgcgctcaccgattgtcggagcagatgaaaacgagctgtctttgatccggcttgaaaataaaaaagcgccgtactatgaggcgatgaaagactacctggctgctggtgaccggagcgatgagctttatcaaaagttaaatacgttttacggacatctgcaaaaatggcgcgcgttttcgaaaaaccactcagtatctgagctgatttgggaagtgtaccgcgacaccaaatatatggattatgtcggcggcatgccgggcggaaaacagcgccaggccaatttgcgtgttctttatgacagggcgcgtcaatatgaatcaacggcatttcgcggcttgttccgtttcctgcggtttatcgaacgcatgcaggagcggggcgatgatcttggtacggcgagagcgctcagcgagcaggaggatgttgtccgcttaatgacgatccacagcagcaaagggctcgaatttccagtcgtgtttgtagcaggtctcggccggaatttcaacatgatggatttgaacaaatcgtacctgctggataaggagctcggatttggcacgaagtatattcatccgcaattacgcatcagctatccgacacttccgctcattgcgatgaagaaaaaaatgcgcagggagctgctgtcagaggaattgcgtgtgctctatgttgcattaacgagagcgaaggaaaagctgtttctgattggctcatgtaaggatcatcagaaacagcttgcaaaatggcaggcatccgcgtcccaaactgattggcttctgccggaatttgaccgctatcaggcgagaacgtatctagatttcattgggccggctcttgccaggcacagagacttgggggatttggctggtgtgccagcacacgctgacatctcaggtcacccggctcgttttgccgttcaaatgatccattcctatgatttgcttgatgatgatctggaagaaagaatggaagaaaaaagcgagcgcctagaagcgatccgccgaggtgaaccagttcccggctcgtttgcgtttgatgaaaaagcccgcgagcagctgagctggacctacccgcatcaagaagtgacgcaaattcggacaaagcaatcagtttctgagatcaagagaaaaagagagtacgaggatgaatacagcggcagggcccctgtaaaaccggctgatggaagcattctgtacagacgtcccgcttttatgatgaaaaaaggcctgacagcggcagagaaagggactgccatgcatacggttatgcagcatatcccgctgtcacatgtgccgtcgatagaagaagctgagcagacggttcacaggctttatgaaaaagagcttctcactgaagaacaaaaagacgctattgatatagaagaaatcgtgcaatttttccatacagaaatcggcggacagctgatcggtgctaagtggaaggaccgggaaataccattcagcttagcgcttccggccaaggagatctatcctgatgcacacgaggcagatgagccgcttttagtgcagggtattattgactgtctctatgaaactgaggacggattatatctattggattataagtcggaccggattgagggcaaattccagcatggatttgaaggagcggccccgatcttgaagaaacgatatgaaacgcaaattcagctgtacacgaaggcagtggagcaaattgcaaaaacaaaggtaaagggatgtgcgctttatttctttgacggagggcacattctgacattatagcgagatccataagctccggaatttcaggcggagcgggtctcgttttctatataaaagagaggtgaaagcatttgcggattttacatacggctgactggcatcttggaaaaacgcttgaaggaagaagcaggctgagtgaacaggccgatgtgctggatgaactgaatacgattgtaaaggatgagcagatcgatgccattgtaatggcgggggatgcatttgacaccgtaaacccgccagctttagccgagcagctgttttatgaaagcctgtctgcgcttagcgacagaggaaagcgcccgatcgtcgtcattgccggaaatcacgataatcctgaccgtttgtccgccgcttcaccgctgacacatgaaaacggcattcatttaatcggttatccgacaacagagccgattcatattgaagtgccttcagcaggagagcttttggcggttggagcgctggcgtacccatctgaagcgcggttaaatgaagtgctatccgatacgtttgatgaaaagctgctccgtgatcactatgatgtgaaaatcaggcaggcgtttgagcatatgacaagccggttccggaccgatgcagtgaagattgccgccagccatatttatgtggcaggcggaaaccaaaccgattcagagcggccgattgaagtcggcggtgcatacacggtggctgctgaaagcctgccggcagatgccgcttacgttgcgctcggccatttgcatcgcccgcaaacgatcaagcgggcgcggacgcttgcgcgttattcaggatctccgctcgcctacagcttttctgaagcgggctacgctaaatcagtgacgattgtggacgcaaagcctggggaagaggccacttggcaagaggtgttattatcaagcggcaagccacttgtgaagtggaaagcggcaaatggattaagtgaggtgtacagctggctggatgaaggcagagatcagaatgcttggattgacttggaaatccgtgtcgcggaccagctgtcacttgaagagattcacaggctgcggaaggcgcacccgggctttatccatatcaggccggtttttgaagaacagaacaaagaccgggaacggatcgaggttaaacatgtctcaatcgaggaccgctttaagaaattttatgaaaaacaaactggcggtgcggtgccggatgaagaaatggtgaagctgtttttagagcttgcatcaggcgttgaagaggaggatgcgaaatgaagccgatcgccttaagcattaaggggctccacagctttagagaggagcagacgatagattttgaaggcctttccggtgccggtgttttcggcattttcggcccgacaggaagcggtaaatcctctatactcgacgcaatgacgcttgctttatacggaaaggtggaacgggcggcgaataatacgcacggaatcttaaatcacgccgaagatacgctgtctgtgtcctttacctttgcgcttcagacgaatcaccaaatctcatacaaagtcgagcgtgtgtttaagagaacggatgaaatgaaggtaaaaacggcactttgccgcttcatcgaaatcaaggacgagcatacggtgctggctgataaagccagcgaagtgaataaaagagtggaggagctcttagggctgacgatcgacgattttacgagagcggtggtgctgccccaagggaaatttgctgaatttctgtctttaaaaggggcagagcgcaggcatatgcttcagcgtttatttaatttggagcaatatggagacaggcttgtgaaaaagctgagacggcaggcgcaggaagccaatgcgagaaaaaatgaaatgcttgctgaacagtccggtctcggtgaggcgagctcagaggcagtggagcaggctgaaaaggttctcgaacaagctgaagcccggctggaagcgatgaggaagaaccgtgatcaggcgaaggagcggtttacagagcatcaggagatatggaatgtccaaaaggaaaaatccacttatgaagaagaggaaaaacgtctcgcagaagaacagccgcatatagacagcatgcaaaaacgcctgctggaagcagaaacagcagcagcccttaaaccctatgcggaccggtacgcagaagcgatccagcatgaggagcaagctgaaaaggaacaaacgctagcccaaaaggatttagcagaccggacagctttctttcagcaaaaacatgaagagtatgaagcgtggcgccagcataaaagcgagaaagagcctgagcttttaacagagcaggaacagctttcacgcttgcaggaaatcgaaatcaaactgagtgaggccaagcaagaggaagagcgcaaaaaggctgacctccggcagaaagaagcggctcttcaatctgtcatgaatgaattagaggccgtaacagaccgcctgacacgagggcaaaacagacagacagaattgaaacagcagctcaaatccctgcaggtgacatccgatgagcgaaaaagctgccagcaggccgcagaaatggcattgcgcatcagacaaaccgaggagcaaatcaaaaaagagaaaaaacgaagtgaagaattgaacctcgtgctgcagaagatgaatgaagagaagaatacactcgttcaaaagacggaagcggaagaaaacaacatcattcaggcatatgaggctgtacaaactgtgtaccatttggtgtgcgaaacggaacgctcattaacacatatgacggaagaggctagaaagagtcaacacacgcttcacttacagcgtgaaaaagcaagggtggcactgctgacaaaagagttagcccaaaagctgactgccggtaagccttgcccggtatgcggttcaaccgatcatgatccatctgcctcagtacatgaaacatatgaagccgacagccatcttgaagaggacattaaacggacagatgtattattgacggaagctgcagctctcagccaggagattctttcagccaaaattacgcttgaagaacagtccgcgcgctttattgaacagtgtccgtttttgcagacaattcaagcacagaaccttgaagcggcagcttccttcgaacatcagccggtgtatgaagcatttgaaactgccaaatttgaatggaaacgaatcaagcaggacattctttctgttaagacacgaatggcacaaatgattggcgcctatcaggagtctttaaaaaaggccgagcagcttaatgaaaaaatcggttttgaaaaaagagaagctgaccgtattgaaagcatcatcagcgagcttcaatcctcaatggacagcagtctgaatatgtttaaagaagcatttcagaatcaatctgtggacgaagcagaaaaatggcagcaagccattgaagaaaaggaccgggctgcagaagaatgtgaaaaacgaattgagaagagtatcgcgtttcttgctgagcatgaagcacaaaaggaaaaactgcgggaatctggacaccggcttgaacgggaaaagctggagcttcattatgcggctgaacgcatcaagagcgtgatagctgattatgagcacgaactcggagattatgcaaaaggagattcgattcaaatcaaactccgctctgtccagcaggatctaaagctgttaaaggaaaaagaacaatctttatatgaagaactgcaaagcgcccaaatgaagctcaaccaagcgaaaagccgcgcttcggcaagcgagctcactcttcaagaggcgaagggcagattggaaaaagcaaaagctgcttggcttgagcatacaaaaaacacctccattacccggactgaggaggttgaacaaagtctcatcccagctgatgaacttgaaaagatgaaaaccggcatagaccagtttatggataaactgaagcaaaatgctgcaaacttaaaacgagtagcagagatacttgccggcagagcattatcagagagcgaatggaacgaaaccgttgcagcattacaaaaagctgaggacgcatttggcgctgctatagaggaaaaaggcgcggcagcaaaagcactggctgtcattcgcgaccatcataaacggtttaatgaaattgaagctgaactgaaaaaatggcagacgcatatcgacaggctggacaagctgcaagctgtgtttaaaggcaataccttcgttgaatttttagctgaggagcagcttgaaagcgttgcgagggacgcctcagcaagactcagtatgctgacaagacagcgctatgccatcgaagtagattcagaaggcggcttcgtgatgcgggatgacgcgaatggaggcgtaagacgcccggtttccagtttgtctggaggagagaccttcctcacctcgctttcacttgctcttgcgctgtctgctcagattcagcttcgcggggaatacccgctgcagttctttttcttagatgaaggcttcggcacactggatcaagatctgcttgatacggttgtaacggccttggaaaaacttcagtcagacaatctggctgtcggtgtcatcagccatgtgcaggaactgcgtgcacggcttccgaaaaagctgatcgtccatccggctgaaccgagcggccgcggtacgcgggtatcacttgagttgatgtaagggaggagcggatatggcaaagcagactgccggaatatgtgagctgtgcggccggagcgatgtccagctgacagagcatcatctcacaccgaaagaggaaggcggaacgtttttgccgacagcgatgctctgtattccttgtcataaacagattcatgccttatataccaatcaagagctcgccgtacgtttaaacggaatggctgaactcagaagcgatccagagcttgcccggtttgtcaaatggatcagaaaacagccgcctgagaagctgatcaaaacaaagaaatcaaatgaacgaaaaaagaaaaaatgactaaaaagcagccctctctttgcagagcggctgcttttatccgtttccaaccatatcctgatcgttgacatcggggtctatataatttgtcgcgttgactgcattatttaatagaaggaaatctcccgtgtttcctgctcccgaaccgagcgcagattttgaagagcttttcggagaaaggtaaaaggaatcaccaaagtttacgactccgcccgatatggaattgatagctataggcccgacaattgctggcataaacgacaccctttatcgaagtctctgtttattatatgttcttggcgggcgattgtgagcgcggagactgaatctgtctgatatgtttgagtctcgcatcaccgcgaataagcgaagctgatccggcatgtaaaacagaagaggctgagaccccttgaattttgatgctgcgaacataaatagccggcacctcgtggcaaaacgcgctttgtacacctgtttcggggagcggcttcacagcctgctgctgaaagatctgatactcctttttgttaaatgagccttcattatggtaaaacgtggacagagaacgctgcacagcaaatacttttacactcatatcgatttcatttgtgtcgccaacttgaaacacacttgcgatcccgagggaattaaacttaactagtctgatgcgcgatatgcgtttaagcattattctggcgcaagcggagcaaacggcccaataataagagattcaggcggtgtatcaaaaatagaagacaggtaaatggattcagtgtctccgatgtggaaaacggaggaactggacacaccgttcatccggatgtccccgacttctaagctgcggttgatgactgtaaagatcatgcttgctcatctcctttcatttctgatggaatatgctccagaaagtgttctacagcgcggatgacatcacgcttcacatgctcagcgatatgttctgcatattgtgcaggcggtgtatgttcttcttttttgatatgggacatataataatggattcggctgtccatttgttttctgatgtcttcaataacatgatgtctgtttgtatcgtcaagtctgctgtcatattggttttcaagctgttccaaaatatctgggatttcctcggttaagtacatgtcgacattctggcggatctgctgcatgagctgagcgctctcttcctgctgcatcatcccgatttgcggtgtcgactggctgacgtcaaagttttggacgctgttcgggtcagtcggatttaaaccgatgttcaaagtcccgtcgagcctttcgattttcagctgatcaaatttatactccacacgctcaatggtagtggccggccgctgtttcatcgtattcatttcagtttgaatctctttcagctgacgttcgagctgctgaatgtgaatcgcctgctgctgaacgaaggaattcaagttttgcaggtaagaggaaacagattgatcatacatgttcttcacctctttcatatgattaacggccaggaggctggagcgggaccaatgaacctgtgtcgggctcctgcagctggagcggttgccctgagccagaaacttctggtgccggttctacatagcttcctgtattatacaaatttgacagtgacttgattgatccggcgctcccgatttgcagaatggaggagttgctgattgattccagccggagatagttgatttgaatggtttgattaatatagaagttcatgagcctcactccttttacgcattggccacgatcggctgatcaaccgcatcattgtcatacacattcgtcgcgttttgataattcatcaccttgaggctgtcgccggtattaaagctgccagcaccggcaaacgttctgacctgagcctgaggagaaatcgtaatgcagtccccgatgtgaacgactccgctcgtaccaatcgcattaattttaaacgctccgacaatggccggcatacgagcacatcctttgttgaaaaattaaaaaaagacaggtaaagtgaaatgacaattctgatttcaattgggctattcacgatagcttatgacaaacgcacatatgtgtgagagaaatttaaaggggacatatcggctctttatgaaagcgctttattttttcgggccgttatgtttaaacatggcaaaagaggatgttgggtataaattgagcggaaatgcggcgaaggatgccgctatccgcctatggtgatttttgtttatttctttggtgtttttgcgtgtagaatgctttttggagtatgtcgtgctgcggtattcgatttttgggcgggcacattctcgccctgaggtatatcccagaagtgctgagcaaaaagcggagttacatgtggtgtattctaattgttatagaaaatgatttacatacgggagttttcaagatatctcccaaaaatcatttcttctttaatccgggtattcagcaggatatccagctcttggctgcattgaatcgtttcttttgaattcatgccatatttttgtgcggtttcaattagtgtgatcctcatttcttcaattttactgttcattacgctatctccaattctagattttattttgatataaatacaggatatcgttagtataacctattttggctcaaaaggttgcctttcgtcaatttgactaaaaaagcgacaatttttgctgcggccttttttaatggagaaaggactaaagtcttgctaagtgtgcttgcaaaaagtcctgccgttcctcaatttctctaagtatgttggtctgctccttttcgatttgaaaggggctttttttgataaaaggatcatcagcagcactttgacaaatgtcaaggtgccattcgttgatgagaggagataatcgttcaatagtaaacgaccgcttcagcacgtttttcattaaggtgtgatattgcgacctgaaggcgggaatggatagaagccttgacgaaagcgtctttccttttgtcagaagcgggtcttcttcataccattcttgtacggcaagcgatcttgtctccatcggggaaacgtaaagccgaccggattcgtttaaacaaaatgtgtagtaaaagccttgattggtgcaggcgttgccgatcagccacaaaaaaaacagcttgacatccagatacaatttaatcctttcagccaattcgtcatctccggctgtgcggatcagtatgaaaaattcatgtaagaatgccgagaaatcattgttaaaaagggacaatggaacccttggatcggccgtcttcactccgtaactccttttaccggctggctgatggttcttgatgttcaaataaatgccttcaggctggccattgatggtcagaaagctgtacgaggcaacgggagcaggtacgccgatctggtcaaaaaaacaataggcgagtctgcgccgcatcagggacggatcatcctgttctgcattcaaaaaaagtgtcctttcaccaagcagagacttttcccagctgatttcataggatgccttttccgctctgtcacgctgtgtgagaagaatgggagaaacagatcgatctgttacgaaaagccccttggctgtacctttccttttcagctgctcccgatgaaaaaataaatgcacgcgctccatattctttcctccttctcaaaacgacatttgtatgatatgtagagcaagcccgtcctgaaacgaaatgaaaacggaaaggagaaaaagggatttcagcattcgacagagaatacatgaaggagcattctgatttaaaagatgatggaggaataacatgaaatttgcgacaggggaactttacaaccgaatgtttgtcggcctgatcattgacgatgagaaaattatggatttgcaaaaggctgaaaaaaaactgtttgaacttgagacgattccgggatcgctgattgaatgtatcgcagaaggggataaattcgttgcgcatgcaaggcagctggccgagtgggcaaagaaaccgaatgatgagctgggatcatttatgtattcattatctgaggtgaagctccatgcacccattccgaagccatcaaaaaatatcatctgcatcggcaaaaactaccgggatcacgcgattgaaatggggagcgaggctgatattccggagcatccgatggtatttacaaaatcgccggtaacggttacggggcatggtgatatcgtaaagagccatgaagaggttacctcccagcttgattatgagggagaacttgctgtcgtgatcggaaaaagcgggacccgcatttcaaaagaagatgcatatgaccatgttttcggatatacgattgtgaatgatatcacggcgcgtgatctgcaaaaaaggcataagcagttttttatcggaaaaagcttggatacgacatgtccgatggggcccgtgcttgtacataaatcatctattcaggagccagagcgcctcaaggttgaaacaagagtcaacggcgagctgcgtcaatccggttcggcaagcgatatgatcttttccattccggaattaattgaaaccctctcaaaggggatgacgcttgaagcgggcgacattattgccaccggtacgccatctggtgtcggcaaggggtttactcctccaaaattcttgcggtcaggtgacaaaattgatattacaattgatccgatcggaacgctgtcaaaccaaattggctgaataaaactggagggcggacccggacccgcccgttttttctgataatcatctttgtggcagaggacaagttcatggtactataagtggggtaatttatctgatagggggaacatatatgacacacctacatattacgacatgggtggtagcgctgattctgcttttcgtcagctactcgctgtattcgtcaggaagtgcaaagggcgcaaaaatcactcatatgattctgcggttattctatatccttattattttgacaggagctgagctgtttgtccgtttcgccaactggaacggagaatacgccggcaaaatgattctgggcattatcaccatcggcctgatggaaatgctgctcatccgcaagaaaaaagaaaaatcaacaggaggcctgtgggtcggcttcgtcattgtccttttgctgacagtgctgctcggtctgcatttgccaattggttttcaattgttttaatagaaaaacctatgaacccggctctttgatagagttgggtttttttatatttatcccctcatattccaaatcatttaaaataaccttaaaattccctgtaagcggtatctcgtcctatgaaattatgataccttcaaggagattcattattttgcaggagggataacatgaaacgcagaaaattcagctcggttgtggcggcagtgcttatttttgcactgattttcagccttttttctccgggaaccaaagctgcagcggccggcgcgatcgatcaggcggctgctctggaaaacggcaaagagcagacaggcgccatgaaggagccggaacaggtgaaatggtacaaagtgaccccgggagcaacggatattcagaaaaactcacatatggcactgaccgtaaagagtgattcagtactgaatgtatctgtatatccaagtaaggaaaaagcgcttaaagatgagacgtttgagatgtaccgttctttcacagcggaggatggaaaaagcgaagtcatttttccatacgcgtggagcggcccttactatgtaaaagttgaatacctcggagaagaagagccagaggacggcggaacggcagaagcagctgcagaagccaagtatacgattgggtataaaggcaccaaaaaacagccgtcagatttagaagaggaagaagcttgtccggttgaaatgagtgtcgatcagaagaaatcaggaaaaggcatcctggataagctgagagcgattcgtgatgagcagctgagccaaacagcagaaggcaaagaactgacaagcctttattacaaagcagcaccgtttatcgttgcaaagctcgcactcaataaaacagcaagaaatgaaatctatcaggatcttgtgacattaaagccgttatttgacgatgtgtcagaaaacggagcatcatcttcgcataaggtcactgaaaaggatcaaaaagcaatcaaccggctatatgataaagctttacaatcagtcccgtcattccttaaagaggagataaagaaacaagcggaccgactaaatatgaagcagctgcaaggcaaaacagccggagccattttaacagaaaaccatattgcagcaaaaagtgaagttcagacaacaaaggttattttcaaggtgaaggacaataaaagcctctcatccgtacataatgaaatgaagggcttttctgcaagcgcgcaatcgaaaaaagacatatccaatgtgaaaaaggcaaagaaactgtttgacaatctgtattcatttgaacttccgaaagatgagaaacagaacggcgcatatacggcaagcgccaaaagggtcaaaagcgctgctgcgacactatccaagatgtccaatgtagagtttgcggaacccgtgcaggaatacaaaagcctggcaaacgacattcagtacccttatcaatggccgcttaaaaacaacggtgaaaacgggggtgtcaaaaatgcggatgtgaaatatgagcctgccaacacattgctgtccaaacgcaagcttaacgatacactcattgcagtagtagacacaggcgtagacagcacgcttgctgatttaaaaggaaaagtaagaacagatctcggacacaattttgtcggacggaataacaatgcaatggatgatcaggggcatgggacgcatgtcgcaggcattattgcggcccaaagcgataacggctattcaatgactggattgaatgccaaagcaaaaatcatcccggtaaaagtgcttgattccgcaggttccggagatactgaacaaattgctctcggcatcaaatatgctgctgacaaaggagcaaaggtgattaatttaagtttaggcggaggctacagccgcgtgcttgaatttgctttgaagtacgcagctgacaaaaatgtcttgattgccgcagccagcgggaatgatggagaaaatgccttatcttatccagcatcttctaaatatgtgatgtcagtcggcgcaacgaaccgcatggatatgaccgctgatttctctaactatggaaaaggtctggacatctctgctccagggtctgatatcccgagcttagtaccgaacggaaatgtcacgtacatgagcggaacgtctatggcgacgccgtatgctgccgctgctgcaggattgctgtttgctcaaaatcctaagctgaaaagaacagaagttgaggatatgttgaaaaagacggcagatgacatttcctttgaaagtgtcgatggcggagaagaagagttgtatgacgattatggcgatccgattgaaattccgaagacacctggtgtagactggcattcaggctacgggcggctgaatgtcatgaaggctgtcagcgcagctgatttacagcttaaggtcaacaagctggaaagcactcaaacagctgtcagaggaaacgcgaaggaaggcacacttatcgaggtgatgaacggcaaaaagaaactcggcagcgccaaagccggaaaagacaatgcgttcaaggtcaatatcgcgactcaaaaacaggatcaagtactgtatgtgaaagcaacaaaaggcgatgcgaaaacatcgtataaagttgtcgtcgtcaaaggaaaaccttccggcacaccgaaagtaaacgcggtgaaaacgaaggatacggcagtaaaagggaaggcaaacagcaaagcgatgatcagagtgaaaaacaaatcaaagaaagtcattgcttctgccaaagctgacgcaaaaggaacgttttcggtgaaaatcaaaaaacaaaaagccggaacggtgctgtacgtcacggctgcggatacagataaaaaagaaagcaaggaagcaaaagtggttgttgaaaagtaaccaaaaagcggtgctcgatgcaccgcttttttatttgcgcccccgttggactgctgaatacataatggatcgctttccgtttgaagccgtccattcaaaacggtctcctgtcccttcgctgctgtagtgatgctgcatcgcgcattgtgcggtgtcatttgaaaagtgataaaaggacacaccctgccccgccgaagtatccgaaaagactcctttattataagaaaagacgcaatcgaataccgataagccgaagctgtgcaagtgctgcagaaatgcgagaaaggtttcgtcgtcaagcgaatccaaaagcgccatgagaggccgcttgactgatttctcatagcggatgcgttctccgccggaaagggagatgttttctgcaccgcatgccaaaaccaacttgtcctgaaagccggcttgctcccactttcctttatgatggacccagattgggctgtgttggagactgtccgccagcagtatatcgccttcaccgttttcgattaagcagatgccgtcttcaatgaggatggtgccgtattcccactttcgttcctctgtatataacaattgtttccgtttcatccatgctgtctcctttttcttcattcctctcttttctttccaattcaagcctgtcccatacaactcttttatggacaaatcaactatctgcctatagatgcataaacttactaaggtgctgaaagaaacgaaattgttacgaaagaaacgggattggagctgatgtcacatgtgtggaattacgggttgggtcgattttaaaaagcagctcgtccaggaaaaacaaacgatggacagaatgacagacactctttccaaacgagggcctgatgattcaaacgtttggggggagcaccatgttttattcggacataaaagacttgcggttgttgatattgaaggcggacgccagccgatggcgtgtacctataaaggggatacgtacaccattatttacaatggcgagctttataacacggaagatttgcgcaaagaattgcgggcgcggggccatcaattcgagcgtacgtcagataccgaggtgcttctgcacagctacatcgagtggcaggaagactgtgtcgaccatctcaatggcatattcgctttcgctgtgtgggatgaaaagcgtaatctgctgtttgccgcgagagaccgtctcggcgtaaagccgtttttttacacgaaggaaggctcttcatttctcttcggttcggaaatcaaagcaatcctcgcgcaccctgatataaaagcgagagtggacagaacgggactttctgaaattttcggtcttggaccgtccagaaccccgggcactggcatatttaaaggcataaaagaaatccgcccggctcacgcgctgacattttccaaagacggacttaatatttggcgttattggaatgttgaaagcgaaaaacatacggacagttttgatgacacggttgccaatgtcagatcgttatttcaggacgcggtgacgcggcagcttgtgtcggatgtgccggtttgcacattcctatcaggcggtctggactcaagcgcaattacagcgattgcggcgggccattttgaaaaggaaggaaaagcaccgcttcatacttattcgattgattacgaagagaacgataaattttttcaagcaagcgcttttcagccgaatgatgacggaccatggattgaaaaaatgacagaggctttcggcacaacgcaccacaaatgcgtcatcagccaaaaagatctcgttgatcatttggaggaagctgtactggtcaaagacttgccgggaatggcggatgtcgactcatccctgctgtggttttgccgggaaatcaaaaaggactttgtcgtcagcctatcgggagagtgcgcggatgagattttcggcgggtacccgtggttccatacggcagatgttgagtctggctttccatggatgagatcaacggaggagcggatcaagctgctttctgactcatggcagaaaaaattgaatctgaaagaatacgtaaatgccaaatatgaagaaaccttggcagaaacgccattattagacggagaaacgggtgtggataaagcaagaagacagctgttctatttaaatatgctttggtttatgacgaaccttttggatcggaaggatcgcatgagcatgggggcgagcctggaagtgcgggtgccgttcgccgatcaccggcttgtggaatatgtttggaatattccgtgggaaatgaaaatgcatgataatcgggaaaaaggcattttacgcaaagcgcttgaaggtattttgcctgatgacattctgtatcgcaaaaaaagcccgtatccgaaaacacatcatccggaatatacaaaaggcgtcagcgaatggctgaaaacgatcagaagccaaaaggactccgtgctccataccttgctggacagaaaacaattagatcagcttttagaaacggaaggctcctctttcaaggtgccgtggttcgggcagctcatgaaggggcctcagctgatcgcccatcttgctcaaattcatacatggtttgaagcgtatcgcattgatattgacgagaggtaggttcaatgcaaatgtgattaaaagccagagatgtatagatttaaataagaaggatagatgagcagggaaatatatgctctatctatccttttttgtacaacagcactatcgaattgcccccgcattccttcaataagaatgaataggttttaatgttctgccgataaaactagctgataccgggcttaactttaattccctagcccatacagaaagttgaccaatatggtgaatttcgtgagcgatgatatggtgtaatatttcatctcgcgtatataaaacacttgtctcccaaggaacgcttacaagttcatcttttatttgatctgaatgtgtttgtaaaacatcaattatttcagttcggaatgtatttgagagagatttcactttattgagtgtttgataatcagcgaactgaacagcgatatcttcttttccttggatagcacgaatccaactatattccacatcaataatatgaaaaagggtatataaaatattctctactccgccaagacggtttttaagtaattcttcagtggttagttgatgacaccaagtaaaccattgatctctaacctgccagttatattcaaaaaattttatcactgaactcactccaatactatcatgtatcataacaattagcccttttttccgtgattcctctattattgaagtgatgattgagaaatgtttacattctacctgttgtatggcattaaaaataataatgcatatctcgtcgatgatgctgtgcgtcttgttacttttacaaagtaagaatcggcattttcttcatatacaattaggaaaaaacatactagacttgaagaagcagtgatacataggagtgagaaaatgaaagagataaaagaagcttaccagcaatgcggacagattgttggcgaatacgcgccagcctgtttcaaagcattatcatatctcccgctaaagcaaagacaagcctcttgggcagtattgtcgttttgccacacggcggccagtgcagacgaaaaggtattgcccgcatttgaagctaaagctgatcatgtttaccaaaggacaaataacggtaaacaacatctatggaaggcttttgatcatgcgtatcggacctttacattggaaagcgaaccttttcgggagtttattgccgcacaaaaagaagacgccaagccgtatgatgaccttgatgaactgctcatgtacgcatatcggacgggcggtgctgccggattgatgctgctgccgatactgacacgccgaaaacaagatcagctcaaacaagcagccgtctctctcggcttggccatacagctggttcgcttcttaagtgatcttggcacagatcagcaaaaaaaccgcattccccgtcaggtaatgcagcaattcggctatacagaggctgatctccaaaaaggcaccgtaaataaagcgttcacaatgacgtgggagtatatcgcttttgaagcagaagcctaccttgaagagtgtcaggatgccttgccgctatttccgcagtattctcaaaaaacggtgaaagccgctcttcatttgcaccgggctgttttagaaaaaatccgggcgaagcagcacgatgtatttcaatatcacttcgctctcacagagaccgaagtgaagcagattctgtctgatatctaaaaaacacccggccttgattgagccgggtgttacgccatacctttttgaatccagatacgtgagcgccatcttctgtacattaagattccccggacccattcatccgcgataaaagaaatccaaatgccggcaagaccgaaaccgaggtggatgccgaaaagataagcaagcgggaggccgatgccccacattgaaatcattgccatgtaaaccgggaatttcgcatcccccgcagcccgcagagagttaatgataatgacattaaacgagcggcctggttcaagaataatggtcatggcaatcaataggcttgcagttgctataatgtcagggctttgtgtgaagagtccgatcaggtcttttgaaaagatcgtcatcaaaacagaggtagccgcagcaattccgagtgcccaatataagctcttcatgcagcgctcataagcggcatcaaattgtttgccgccgatataacggccgattaagatttgtgtaccctggctgatcgcagtgccgaacagcaaaataaacatcgtaatattttgcgtatacacttttgttgtcaacgcctgcgcgcccatgatggcgataaaatacgtgacaatcatttgcgaaaggttgtatgaaagctgctctcccgcagaaggaatgccgattttcagcagcttgcgcaaatgctctttatgcatatgaaagacttttttcagcgacatcttcagctggatgcgtttgttgacaatcacaatcatcgcgattaatccgatgacgcgggcgatagatgtggacatggccacaccggtaacgccgagaacaggaaagccgaacaaaccgaaaatcacaacaaagtttccggcaatgtttaaaatgttcatgccgatagtgacaaacattgtatcttttgtgtagccgtagctttttaagatcgcgctgaatgtcatgattaaagcctgaataaaggacagacctccgacaacttgtaaaaagactttcgcatcaggcatcagtgcgtctgataatcccatcatatgaagcagagggacagccgcgaaaaagacgacggcgctgatggccaggctgatgaagaagttggcgccgattgacacataagcgacttccatggcttctttcttttgccgtgagcctagaaattgtgaaatgataacggtcgttcctgttgcgataaagctgaacatcacgataattaaatttaaaatctggttgctgacgccgactgctgccacgctgttatccgagtattggctgagcatcagtgtatcggcattacccataaacatatataatgagacctcaataaagatcggccaagtaagcgaaaataatgagaacgttttgtcagcgggttttttcaaagcagttgatttgaagacagcttgtttcatagtgtctaacccctttcgtaaataaaatcaacgttttaaagtgtacctccatttccttataataaaaagggatagaaacgatacttcttgtaaaaatccgacttaaaaaggaggatgattcaaatgccccgcatcctgtttacagtcccgccttttccggtatttattgcagctggggaaggggtttttaaaaaaggagaaacccatgtgaaacgtgtattctccgtgtttgatctgatatatgtcaaacagggaacgttatatataacggaaaatgaaacatcgttttctgttgaaggcggcgagtacatcttgctttctcccggtcttgaacactacgggacgaagggcagtgatgaagcaacctcctactattggcttcacttcgatgaacatcgatatgaatttacggcaaagggaggcagcaactggtctgagcttcagcaggaaaaagggagcttcgaagagccggcccgctacggattggctttgccgagaaaaggcaaggtgcagcgcccgcagtttatggcgcagcagtttgaaaagctgatcgattactccgcggaaaactctgatttgcccctcagaaagcaaatcttatttgaggagctgatgctgcatcttcaaaaagaagcgttccaaataccgtctgcgaaagagcgggtagcctgggaggcggcccggtacttacaggagcactataaggaaaagacgacaatcaaggatctgtcgctcgcccttcactatcatcaggattatgtgagccgctgcatgcagcaggtgctcggcgtaactccggcacaatacacgaaccgggtgagaatgacggaagcgaagcgtcttttatcctctacaaatgataaaatgggcgttattgcggaaacggtcggaatggaagatccgacatacttttcaaaactctttaagcagatagaaggcatttcaccaattgaataccggaaaattgtcagccggaaagttcaataaccagacgagggatgaacatgaaaacaacaatttacgatgtggcaaaggcggcgggtgtctcgatcacaactgtgtcccgtgtgataaacaatacggggagaatcagcgataaaacacggcagaaggtcatgaatgtcatgaatgaaatggcatacacgcccaatgttcacgccgcggcgttaacgggaaaacgaacgaatatgattgctctcgtggcgcctgatatttcaaatccgttttacggcgaactggccaaaagcattgaggaaagagcggatgagctcggttttcaaatgttgatttgcagcaccgattacgatccgaaaaaagaaacaaagtatttttctgtgctgaaacagaaaaaggtggatggcattatttttgcaacagggattgaaagccatgacagtatgtctgctttggaggaaatcgccagtgaacaaattccgattgccatgatttctcaggataagccgcttcttccgatggatattgttgtgatagatgacgttcgtggcggatatgaggctgccaagcatcttctgtcactcggccacacgaacatcgcctgcattattggagacgggtcaacgacaggcgaaaaaaatagaatcaaaggcttccgtcaggcgatggaggaagcgggcgtgcccattgatgaatcacttatcatccagacgcggttttccttggaaagcggcaaggaagaagcgggaaaattgctcgacagaaacgctccgactgctatttttgccttcaacgacgtattggcttgtgccgccatacaagctgcgagaataagaggcataaaagtgccggatgatctttctatcattggttttgataatacgatactcgcagaaatggcggctccgcccctgacaaccgtagcccagccgataaaagagatggggcggagcgtcatcgaactgctggcagaagcaatagagggaaaacgaaaggcgaaacaaaaaatagtgctcccgcctgagcttgtagtcagacattctacatcaccgctcaacacatgagcccgctaatgagcgggttttttcattatgacagttgaagccaaaaaaacatattgcgtgtaaaccaaaggcagtgtaaaatgaaaccatcttttgagaaagcgcttgcgcaaaatggcagagcggatagaaccgctgtttttttagctgttaagagaaagcgctttcccaaagcgagcccgaaatgagataaaggagaggatgggacgtggaacatcaagtaaggtgcgcagtattgggattaggaaggctcggttattatcatgcgaaaaatctcgtcaccagtgtgccgggggcaaagctggtttgtgtcggtgatccgttaaaagggagagcggagcaggttgccagagaactcggtatcgaaaaatggtcagaggacccgtatgaagtgttagaagataccggcattgacgctgtcattatcgtaacgccgacaagcacacatggtgatatgatcatcaaagctgccgagaacggcaaacagatctttgttgaaaaaccgctgacattaagccttgaggaatctagagcagtttctgaaaaagtgcaggagacaggtgtcatctgccaagtcggctttatgagacggttcgatccagcatacgcagatgccaaacggcggatcgacgctggagaaatcggcaaacctatctattataaaggctttacgcgcgaccaaggcgcgcctcccgcagaatttatcaaacacagcggtgggatttttatcgactgttccatccatgactatgatattgcccgttatttgctaggggcggaaattacttctgtttcaggacacggcaggattctgaacaatccgtttatggagcagtacggcgatgtggatcaggcgctgacgtatattgaatttgactccggcgcagcgggggacgtcgaggcaagcagaacctctccatatggacatgacattcgggcggaggtgatcgggacagagggcagtattttcatagggacattgagacatcaacatgtgaccatcctatcggctaaagggagcagttttgatatcattccagactttcaaactcgttttcatgaagcctactgcttggagcttcagcatttcgccgagtgtgtccggaatggaaaaacaccgattgtgacagatattgatgcgacgatcaatttagaagtgggtatcgccgcaaccaattcctttcgaatcggcaggccggtacagctagatgtgaagcacgcttatacaggtatgtaaaagctaaatatgttgcattttaggctttccgcaaaaaaaagcaaggacatttttagcccttgctttctcttttctcatataaatagtacatataatcagtaggtatgcctgaatggcccagctgtctcagcatggcggttacgttacctctatggtaagtcccgtgattgacgacatgcaggatggtgtctgcataggttgattccagtgtacctagtttcggatgctgcattgtgaaggtctgttctaagtccgtctggcggctgaagaaatcatgatactgtgactccagctcggcagcgtgctgtttaatcgctgccatattaccttgcgcggactctaatttgcctgcgctgtctataatctcttggtaggccactcccgaaagaacattcagccaaatgtagtcagccctgcacatatgaagcagcacgtcgctgacagaaggaaatacgctctttacttcttgataggcagtttcctccggcaggttttcgatatgggtaaatattttcttgtttgcccaagaatgatagtcataaaactgttttgcatcagtcatcagcatgcccccttttctaagaaattcgtttttttcatctgtttctccttcaattgcaaaagagtgacaccccaaaatatcctgccgctgcccacataaccgctgcagagcatttgtttacgatcagcataagcctgccgctcgtatctatcgtctgaaacaaccggcccgctattgcaaggctgataaaccaaatccaagacacagcgatgcaggcggccataaagagccatttctcaagccccgaatattgaagagagctcgtgccgatgacgccgatcgtgtccagaatggcatgcgggtttaaaagagaaacagcggccgcaaacgcagcttgcttttttggtgtgaacgtatgtttctcattttggcttgtgttcggacggctgttccaagtcacccagcccatataaagcaaaaataaaaatccgccggccatcatgactgtctcaaacacaggcagctcctgcacaatgacagacacgcccgcaacggctaatacgattaacagggtatcgcagactgaagcactgatgacagctgggagagcccgccaaatatgcttttgccacgcgccttgctgaaaaataaacacattctgcactcccagcggcaaaattaagccaaacgcgagcacaattccgtgaatgattgcattcatgctgaaaaagctcccttcacatttttttcaatcataagagagattgtcactaaagtctccagccatttggttgggttagaaaccagccaaatgtataatgtgtaaaaaaggggggcatgaccttgtcgcaatggcagccaagccgaaagtcggatgttccgctgcatcggcagatcgaacaatatatgaaagacaagattcttcacggagagtgggctgtagggacgaaaatcccctcacagagaacgctggccggcatgtttcaagtcaaccgcagcacagtcacagcagccatagatgaactcacgtctcaaggcttgttagagggaagaagaggcggcggtacgaaggttgtaaacagtacttggagcgtgctggcggctgagcctccgcttgattggagcgattacgtccgttcgggcattcatcgcgccaattcttccatcattcaagctattaatcagaacgaaccaagagcggatatcatcagattaggaactggagaactttcaccggatcttgtgcctgctgacacaattggacggatgtttcagcaaatcaatccgggcgccctgtctttaggatatgagcagccgaaaggaaaccgtcagctgcgggaggcagtagccgaccatttaaaaggaaagaagatccatgtgtcaccgtctgcaattttaattgtgtccggtgcacttcaggcacttcagctcatctcaattggacttttaaaacgagattctgtcattttgacggagaagccgtcctaccttcaatccttgcatgtatttcaatcagctgggatgcggcttcgcggcttgccgatggatgatgaaggggtcaaagcggggcttgtttcttctaatcgaaaacaatatggaggacagctgctttacacgattccgtcgtttcataatccgacaggcacagtcatgtcagagcagcgaaggaaagagatcatcagcctgtcaaaaaaagagcagctgcccatcattgaggatgatgcgtacggtgatttatggtttgaagaaaaaccgccgcagccgttgaaagcaatggatcatgagggcaatattctgtatctgggcacgttttcaaaaacggttagccccggtctgcgaatcggctggcttgccggtccggagccggttattgaaaggctggcggacattaaaatgcagacagactacggatcaagcggcctgtcccagtgggcggctgccgagtggctgtcacaggggtattatgaagagcatctgacttgggtacgcaggaagcttaaagaaaggagagacgcagccgttcattttctcgagcggtatgccggggacattgccacgtggcggattcccgcaggcggcttttatatttgggtgacatttcacaaaaacctgcctgtcagccgtttcttttatggattgctgaaacggcaggtgcttgtgaatcccggctacatttatgacggtgaagaccgaaacagcatcaggctgtcatattcctatgcatctcttggagatttggaaactggcattaaagcggcagctgaaacagcacgctgcctgatgatgtcctaagctttggttatacgatgacagctcccagtgccctggcgaaggcaatcgcgtgctcaggtgcgattttgcagcctttcaatttgtcgagggagacatgaagctgttcaaaacggcacgtgctgatgtccatgttttgaagggatgtgccggtaaagctggcgccttccaattcgcatccgtcaaagtgtgtctgctggagcaccgtattgctgcattcactttgcataagagcacagtgatcaaatcgaacttgtttcatatttgagtacgaaaatgagctgaaatgtccgtggcattcctcgaatgaaacatttcgcagcgttgcttccgccacattcattccaaccatttttgactgcttaacagaagttctgtgaatgacagccccgctgaaatcggcgtttgataaatcacatttttcaaagatcacatcggtcagttcaatatgccgaaaagacacatcgataaagacgacatttctgaataccgttttttcaacacagagtctttcgatatcttcgccgcagattgtacaatcttcaaacaaatgcatgctgattacatcatcctgcgtcacggcatcatgaaaatctgcggtttgcaggttttccggtatgttcggtttttgaattgcgattttattcatgtgatgacatcctttgctgcccgaaaaacagaggcttccgggttcaatttaatagatcgttaaggaaattgatacatatagtaaatcgtgaagagccttttcttggtacagcagccagcttgttttgtaagcataaatggaaagcttcctatacgtcaaggcgtttacaggccgggaaagccaaagggaacaggaggaatgcggaatggggcattacatcaaaaccgaggagcatgtgacactgtttgtagaggatatcggacatggaaggccgatcatctttttgcacgggtggccgttgaatcataagatgtttgaatatcaaatgaatgagcttccgaaaaggggatttcgttttatcggcgttgatttacggggatatgggcaatctgaccgcccttgggaaggctacgattatgacacgatggccgatgatgtgaaagcagtcatttatacgctgcagcttgagaatgcgattcttgccggtttttcaatgggcggcgccattgcaatccgttatatggcaaggcatgaaggagccgatgttgataagctgattttactgtctgcggcggcccccgcgtttacaaaacgcccgggttatccgtacgggatgaggaagcaggatattgacgatatgattgaattgttcaaagctgatcggcccaaaacactggctgatttagggaaacagttttttgagaaaaaagtgtctccagagcttagacagtggtttctcaatctgatgctggaggcctcctcctacgggacgatccactcgggcatcgcattaagagacgaagatctcagaaaggaacttgctgcaatcaaggtgccgacgctgatcctgcacgggagaaaggatagaattgcgccgtttgattttgcgaaagaattgaagcgcggcatcaaacagtcggaattggttccgtttgcaaacagcgggcacggagcattttatgaggaaaaagagaagatcaacagtttgattgcgcagttctccaactcataagaaaaaacccgacattgatcgggttttttatataattcctctgttttgcagtgcgttaatgatgagatcagctccatcggaaatagaggtctggtctgactcaatgatgaaatcgggtgaaagcggcgcttcatacggagaatcgatcccggtgaaatgtttgatctctccgtttcgcgcttttttataaagcccttttggatcgcgctgttcacaaacatgcagcgggcacttcacataaatttcgaagaactcacctttaggaaagagcgctctaaccatgtcccgatcctctctgaatggagaaataaaagccgttaaaatcatttgcccgctgtcgacaaacagcttcgccacttctccgatccggcggatgttttcaatcctgtcaccagtctgaaatccaagatctttgtttaagccgtggcggatattatcaccgtcaagcacgtagctctgaatgcccttgcggtaaagcttttcatcgacagcattggccagcaccgattttccggagccggacaaacctgtaaaccaaaggacgcagcttttgtgtccgtttaaggactgtctgtcagactttgagatggcagcgggatgccaaatgatgttcggattgtgtgtcattgcaattccccgctgttttgcttgatggcaacaggctgttggtgaagtcccttgatcagcacggctgcgacctcaggccggctgaattctttaggcggctttttgccttggcggagaagctctctcacttttgtgcctgataagtggatgtggtctctcgggctgtgcggacatgttttggaggtgcccatgtttccgcattttcggcaataaaagctgtgctcaaaaaacagcggcttgatgcccagctcttcctctgtgaatgattgaaaaatattttgggcgtcgtatgttccatagtagctgccgacacccgcgtgatcacggcctacaataaaatgggtgcagccgtaattttttcggacgagcgcatggaaaatcgcttcccgcggacctgcataacgcatggcggcagggaaaaccgataacatgacacgatcctttggataatagtgattaagcaaagcctggtagctctccattctgatatcgctggggatatcgtctgactttgtttctccgacaagcgggtgaagcagcagaccgtcgaccgtttctaacgctgttttttgaatgtattcatgcgctctgtgaacagggttcctggtttgaaagccgacaatcgtcttccagccgagttttttaaaggcggctcttgtttcagcgggcgttgcataaaactgttcgaaagatttgtcaggcaggcggctgaccgtgataggccctccgatatagtaatccgggcgcgccagcaatttttttacgcctgggtgggcaggatcgtttgttttaaaaacagacagtgcttcttgtgttttatcaggctggtatatatcggtgactgtgatcatgccgtaggtaacaccgtctttcacaagcttgacgtgatctccggcagacagctgttttgctgttttttctccgacaggcagcgtaatcggcaggctccacggcaagccgtttgccagcctcatttctttcacaacacgatgataatctttttccccaaaaaaacctgttaacgggctgtatccgccgatcgcgataagctccagatcactcagtgcaagctgatccagctctgcttggcacgcgcacccttcaaaatggcatgcgggatcacagcggttgattaatacccctccatggggttcgtttccattcaacgtgttcaacctccatttatacgtttccttgttttcttttctgcagttaatgaaagtttgacatcagcgtctcaacatcatttcgattctcacatcaagaacctgccatccgctattcctgatgcaggccgcattctgttttctcccgtccggcccatcttccagccctctcatcgttcgggtccggggaaggcagtgtacacatttcacagcctatgctcggataatgttgatcgtgcagtttgttataaggcaaattgtgcaggcggatgtacgtccaaacgtcatcccatgtccagtggataagcgggcaaattttgatgagctcaaacttctggtccaggtttacgtattgaatatgctttctcgttggtgactgatcccggcgcagtcctgaaatccaagctgtcatgccggacaggtgctttttgagcggttcgattttccgcaattggcagcagaggttcgggttatgcttccacagctctccgccgtacttcgtcccctgttctgttaagctcagctcgggttcgagcatctggattgcaaatcccggatatcgctctttgacggtctcgatcagctcatatgtttcctgaaaatgaagcccggtatccaaaaagatgatgtgtgcatttttgttgatttttgatattaagtcgagaagcaccattccttctgcgccaaagctgcaggcatacacaatcttttctccgtacgttcggtaagcccatttcaacacatcgagctcatcgatcaattgatccgttatccgtttggacagcatgtcgttccatgtgtcatatgtgatggtttcgttcaatgttttccccccgtttgcatctgctttttttatctattgatcgagttataggcagactattcattttttgcataaaggttcaggttttaggtgccgcgcccgcctaaaatgaggtgcggaaccattaagagcccggctgaatatgctttttagcaaaatggttttatgcccaaggagaggtagtatgccgattgccatttatcaggggcatcatcattcgcttgccccggcggacattaacatcgtcattgatgtcatcagagcctttacggtcgcccattatgcgtttatcggcggggcgaaagagattttgttggtccggacagctgatgaagcctttgcgctgaaagacacctatccggattatgttttgacgggagaggaaaagggggtcggtatcagcggatttgatttagataattctccaaaacgtatggctgggcagaatatgacggataaaagcctgatccagaaaacaacaaacggcgtcacagcagcattgggggcgctgaacgcaaagcatctgttcgtaactggattttccaatgccaaaacaacggcacagcatgtgaaaaagctcgtcgcaaacgattgtgtcataaacatagtggcttcccatccatccggtgatgacgatatggcatgtgcggagtatatcaaaggcatcattgaagggacaaatgtggtaacggctgcggaggcgattgaaagaataaaaggctcttctgttgcggagaagttttttgactgccgccagccattgtttgattcggaagacatcgtttactgtacaaaagaactgacgggcgatttcgtgatgaaagtgaaacaagatggagaagttccaacgatagagagggtcataatatgaatgatttttcactagaattgccagtgagaacaaacaagccgagagaaaccgggcagtccattttaattgataacggctatcccttgcaatttttcaaagatgcgatagccggagcgtccgactatattgattttgtgaaattcggctggggcacctcattacttacgaaagatcttgaagaaaaaatcagcacactgaaagaacatgacattacatttttctttggcggcacactgtttgaaaagtacgtaagccagaaaaaagtgaatgaatttcatcggtactgcacctatttcggctgtgaatatattgagatttcaaacggtacgctcccgatgacaaataaagagaaagcggcttacattgccgatttttctgatgaatttcttgtgctcagtgaggtgggcagcaaggatgcggaattagcaagccggcaaagctctgaggaatggcttgaatatatcgttgaggatatggaagcgggcgcggaaaaagtgattacagaagccagagaaagcggaacgggagggatctgttccagcagcggcgatgtcaggtttcaaattgttgacgacatcatttcctcggatattgatatcaacaggctgatttttgaagcgcctaacaaaacgcttcagcaagggtttattcaaaaaatcgggccgaatgtgaatctggccaatattccatttcatgatgccatcgcgttggaaacgctgcgtttagggctaagatccgataccttttttctgtaaaatagcggctgcggggctctcgtcgtgaagagagcctctgcctattattttttatggcggtacataggcgtgagatagggaagtgaggtcaggcggatgttgtagatgaagtcgatgactcttgtcgatatcacctggcatatgagggcttgaatgacgatgccccagtcaataatagacgcggtgaccataaaaatgatgcaattcatgatgagcaggatcgttccaggattcccgccgcggtagatagaaatcatcagagcaagggctccgaatcctccgttcgaaattttatatttgtataaaagtccgattccgagtcccaataacactgcgccgcttgccagatcaagccacaggttagatgtgatatcaggaaaaactgcatcaaagatcaataccgagacagaggtgacggtgatagaagcgagggtgccggtgaatgttctcatctccagccattttaaagcggtaaaaagcattgatacattcacagcccacactgaaaatccgtgggggatttgaaacagataatgcaatagcaccgcaatacctgctgcaccgcctgtcggaatatcatgcggaaataaaaacaaggacatgccgagtccctgtagtacgccgcctacgacaatcataaacgtaagttttgctttcatcagcagttcagccattaagtcatttgctcctttatgaaaagacttgtccgctgttttcattttatgaggctgtccattatttatgtctcaaaataaagaaatggcccagcttaataggctgagccatcccacttgtagcgattgacgatctccatattgatctctgtgccaatgccttttcctttcgggatgtggaccattccttttgaaggctgcaggctgacgagatctgtaaaaggattctccatgacgtcccactcgatcggttcaatgtgatcgtacttcattttagaccatgggggcagacaggcttgtgcaaataaagcatagagccgtgaaagcgatccgtcatatgcatgggcggatgctctgacgccgaaataacgcgtgagctggaggcagtcccgaaactcatcaattccgttgacatgcatgacatcgggctgaatgatatccaaacagcgctgtgaaaggagaggcacatattgcgccgggcctttcatgttttctccgccggcaacaggaacagacaaacggcttcgaagcatagcgtaatcctgcggctgatcaaagggcaaaggctcctcaagccagccaatgttcgtccattcggagaaatagcgctcccatttaaaagccgcagcggtatcgtagctttggtttgcgtccagaatcatcgtaatggagctgcctgctgtatgctgcagcgcattgatgtgccggacatcctctttgaatgaagtcccgccaattttgactttgatttgctcaaaaccttttttcaactgggcttcaacattggagactgagcggctgatccattgcggggagtctgagtacgattgaaaagacgcgtacacaggaatctcctctctgtatcgcccgccccataattcgcaaaccgaacaatccgcagctttggctgcaatctctgtcagcgccatgcttacagcggaggccgcccgctggtgccatttttgaatcgtgcgcactaatgacaggcggctgccagcctgttttcctaaaagaaacgggatgatccgtttcgtaaaaccgacatggagagcagggagccaatcaacacattctccccagccgtctatcccgctttcggtgataatcctgatcagataacaagtccgatatcgtttaagcccgttggcgtctccgtatggcttgtttaatcggtgcaagagcggaaaggtttcaatgcgtacaatcttcaaaccgtgtgctacctttcctcagcgggctgcagccgattgccagccattttagggtcttctttctcttttgtttcttcattattttgcttcacatggattaacatcatcacaagaatgccgacaacgagagtcaatcccgcaatgcttaaaaacatgccgggtctggaccattgcatcaggcggccgaaaatcggagggccgattgctacccctaagaagcgtacagatccgtacagcgaggtgacaaatccccgtctttccttgccgacagccccggtaatgaaactgttcacacaaggaaggacaagacctgagccgatactgctcagcacgagaacactgataaagaggacaagattttcaatgaatgacagtgccgcgtaagatacggtcatgaacgccaatccgagtacgatcagttttttcattaacgattgcttttgcccgattttgcttcctgttgtataagacgtaacacacataaccaaaagcggaatcgctaaaatcaagccttttttcacgccgtcggtgtcgtatgttttttcaagaacatctgataggtaaaacaggatgccgaataaagtaaacaaacaggtcgcaccggctaaataagcggtaaacagccatctgccttcatgtttaaaaacacttaacagccctttcgcatattttccgataggtggcggttctttttcctttttcttctctttaataaaaatccaagtcagcacgattgaaatgatacaaaacacagggaaggcaaaaaacgcgccataccagacaagcagggcgataagcgagccgatgatcggtgaaagcactttccccatgccgtttgaagcttcaacaaggcccagcaccttgctctcctgggcgcctttaaacagatctcccgtcagtgccatggcaatggggcctgttccggctgccccgattccctgaagcgctcgtcctgccatgacccaaggaaaggcattgtcaaaaaaacctgccgcaaacccggctaacaaaccgccggcaccatacaaaattaagcagggaataatgatgattttccttgagaatcggtctgcgagataaccgacaatcggaatcgcaaatgctgcaatcaaggaaaatactgtgatcacgagactgacttgaaattgtgataaatgaagttcagatttcatttttggcaaaatcggaataagcatcgagtttcctagggttaatattaaagggattgaaccgattgctacaatcgtcattccgttattttgttttgatgattccatctcagagcacactccttttcttctgcttagaatgtccctgatggcttcgtttattcagcgatcagacagcaaaaaaccgaacagaagatacctgttcgggaaaaaagagggttaaccgagagcctgtgaaatcaaagcatataagtgtccattttgaataggcgcttttttctgatagaacaaaatcggaggttcatcatctttatgaaatcccatttctatcaggctgtcatgcagagacgtgtgttcactcggtatatcgattcgcatcggcccttgtttgccggccgccagccttgtaattatctgtgctgcaacatctgatgatggagcgatgatagggccgaatttcaaattggccggtgtctgtacagaaagtccgtagccaatgagctgtccgtcctgatttctggcgatgatacattcgcatgaagcagaaataagctgctgcaaaaggtttgatcgatctccgccaaaggcagccagatccgccgcggttaagtcgtgaaagtcttgttctctaaaggatgtcagttcagcatcaagcttttttgtataaggttgaaaactgtgacagctgtactttcgcactgaacctgccgtatgaaaacctgctttttcataaagcggcaaaccttcttttgtggcgcaaagcctgatggcggtgttttcatccgtttgggtaatacaggcgtttaccatacgccggccaagaccgagccgttgatattctttgtcaacgatcacgaggccgatagaagcaagccggccaaacaaaaacaagccgatgcaggaaataatatcaccgctgacattttgatagccgaaaaagcgtccttgctggacaagcagtgccagctcttgttcgccgtaatccggccacccggcttgcctgcaaagccgcaatagactagggatatgttcttcatgaagcttaatcagctcatcgattaccctcatacagatcacctgcttgtttcgagttttttatacatgatgatatgtgtgcctatgccgggaatctcaaacggttcgccgagttcttcccagccaagctttgaatagtagcctttcacatggcttctggcattgcaccagactgcctgaacgccgttctttgccagtttctcttccgcgtgtttgatcagcgtgctcccgcctttttgatcacgatatccttcaagcgttgccatgcctctcagccgatatgctggggattctgttattaatggctgattttgcggggaaaaagaagcgatgctgatcagctttccttcaaaaaacgcgccgagatgaaaggagccttttgcatgatcctcttcatatttgcattgttcaatggattgatggggacgcagaatgcggtgccgaatttcatatgtatcttccgcggaaatggttttgacttcgagcataatgttcctcctcatgactgtttttctatatcgtaacacgaatcccgttgaaaaagaccgcccgattggatcagacagtcttttaagggattaatgcaaaaagatattttggcgctgctcatctttttgctgaatatatgaagtgagctcagcggttaagtcagatctgaggaaaggcgttatcaagtagatgccgttaaacagctcgcatgccgtatccagcagggagcgtgcaattgcaaggccttccgccttttgcttttctttatcttcaccggcatgggccattttttcgcgaatcgtatcagacagcttaatgccgggaatttcattatggatgaattcggcattccggctgcttgtcagcggcatgatgccgatatagatcggcgtcttcagatgttttgtttcgttatggatatcgacaagctgctgctcggaatagacaggctgagaaacaaaataatctgcaccgcaatctatttttttctcaagccgttttaccgctttatccagatggcggacgttaggattaaatgcggcggcaactgagaaattcgttttcttgccgagcggttttccagacagagacagaccttcattgaattgtttgatcagcctgattaaatcaaaagatgttaaatcatatacagacgtcgcaccaggaaaatccccgattttagaagggtcacctgtaatagcaagcacgtcattcagccctaacgtatcaaggcccattaaatgtgactgtaagccgataatgttacggtcacggcacgtaatatggacaagggaacgcatatcgagctgctgcttgacaagggcaccgcaggcaacattgctgatccgcggggtcgccaaagaattgtcggcgagtgtcagggcatcgattcccgcttcttttaattcagcagcagcggacagaaatttgtcaaagctcagttttttcggcgggtccagttctacgataatagagcgttttttcgctgcgatctcatccaggccgggctcggttcgctcgtgatgaacagaaatgaattctttggcccgggttttgacttctttttccgtaatcggagccagtccgccaactgcttccgccatcgccctgatgtgattcggcgttgtgccgcagcagccgccgataatccgcgcaccttgcttacggaattctgacgcgctgttttgaaaatacgtgccgtctgtttcatagacgagccgtccctcttcaagcgaaggaagactgctgttcggataaacggataagaatacgtcatcaaaaattggcacttcgctaagcgcttcaatcatgtgataaggcccgagccggcagttaatgccgacgatatcagccccgagatccgcaatcgatcgcaatgcttcagaaagaggtgttccgtcctgcaatacgccttgctcgtgcatggagacattgagcattatcggaagatcagtctctttgcgcgcgattttcagcacttcacgggcttcttccaaatcataatatgtttctaacagcaagccatccggctcttcatgcagcagcagatacagctgctcgcggaagctgcgcttaatttcgtcaagactgtacgcgtttttattaaatgtgcgtatgccgcccatcgttccaagcacgtatgcatcgcctgctgaagcccgcgcgatctttacggcctcctgattcatttttttgatgtcatcctcaagcccgtgtctggataatttaatatagttggccccgtacgtattcgtttgaataatgttggctcccgcttcaacgtacgctttatgtatgcgctgaatttcctccggctttgaaatattgagctcctcaaaacacctgtcaatgccataggagtagaggagcgtccccatggcgccgtcaccgattaacacctgtctttgcaaatcttctaaaagtcccattgtctgcctcctttattcacatcagcaaggaaaaaagagaaataaaaaaagtcctcttaagaagaagactttgtcagtgattttgtctcttcttatcttccaagctgttcgagcttgctggatttagcaccttggtcatggctgatcgccattacaccggttgctgaagcttcgtcgggccagtccctctgcttctcttgataagaacggatatgaaattttcgtgtcaggaagtgccaaaagatatctggcgtttttccctttctccaaatttaccgaaaataaagacaataatcaataggaatcagaaaatttatctgaaatttataaattgaacgtcaattggcagatctgctccccgtacagctgagataatctgctgcaggtcatctttgttttttccggtgacacgcacttgatcatcctgcacctgagactttactttcagtccggagtttttgatgatcgtattgattttttttgcgttgtccttgtcaatgccttgaacaagctttgcacgctggcgcaccgttccgcctgacgcgttttcaaccttgccgtaatcaatgttttttgtcggtacgtttcgtttaatcaatttgctgaccagcacatctttcagctggcttaatttgaattcgtcatcggaaacgaggaccagctcctctttatctaaagaaatgtcgcttttgctgcctttaaagtcatatcgggtactgatttccttcagtgcgatttggattgcgttttgcacttcaggcaattccaccttggatacaatatcaaatgaactttcttttgccatatgaaaacctccataacatttaacttatgtgttgattatagtagaataaagagaaacttccaacagaacaaagaatcaatttgtgatgattggaaaaaatgttaacaaaatccgcagagaataagcggaacaggaaggacgatagcatgagaccagggcagcaattaaccttgagtatagatcaccaaaccgacttcggttactttttaaccgatggggaagatacgattctcttacataacagtgaaatgactgaggatatcgaggacagagacgaagtagaagtctttatatacgtagaccagcaggaaaggcttgcggccacgatgaaaattccgatcatcagcgcggatgaatatggctgggttgaagtggtggataaagtggaagatatgggcgttttcgttgatgtcggtttatcgaaggacgcactagtcgcaactgagcatttgccgccgtacgaagatgtctggccgcaaaaaggggacaaactttactgtatgctgaaggtgacgaaccgggggcgcatgtttgcgaaaccagcgccggaagatatcatcagcgaactgtttaccgacgcttcagaagatctgatgaataaagagctgacaggtacggtgtacaggctgatcgcatcgggttcattcgtgatcacggatgacggtatccgctgttttattcacccgtcagaaagaaaagaggagccaagactgggttcaagagtcacaggccgggtgattcaagtgaaagaagacggttcagtcaacttgtcgctgcttccgagaaaacaggatgcaatgtcagttgatgctgagtgcattctaacgtatatgagaatgagaaacggtgccatgccgtacagtgacaaaagccagcctgacgatatcagagaacgttttaatatgagcaaagccgcctttaaacgcgcgctgggccatttgatgaaaaacggaaaagtgtatcaggaaaatggatggacatacgagaaaaaatagcatgaaaacggctcgcctgcagcagactgcggagcgagccgtttttttatgtctagtttaattcatcaaccagcgttctgattgccatttcgcgatccacattgtctgaaatcgcaatcggcgtaatatcaatggcgagaatgatcagaatcagggcacctgctgcagcaacataagaaacataatagaaatagttagcggtatcaacagtgttgacaagctcggcctgaactctggatgtatcatccttagaagcggcgatttcctttgcagcttctactttttcttcaacgatttgacctgcttttttcagcagttcatccactttcaatgcatctttgctgtaaacagctttcttcaggttatcaaaaaagtcagcatcctcttttttaatatcagcgacaacctgattggcaaaagcctttgcctgttttgtgttgagtttgtctgtcatcgctttattaaagacctctggaagctgtttgccaacttccccttgggcaaacacaaagcctttaaaaatttcctcacctgaatactcaagctgctttgcctgtgccacactttcttgctgcttcaccaaaaacacagtcgtcaccaatacaaccgacaaaaatactagaaacgccttcttcaaactgaaacctctcccttcttgtgttttttattccacaacagtctgcgaatatatgtaaattgaatcgtggaatcgataggagtgagatacaatatcaaaatgccggccatgataatcgaaaaactgatgaggcccagcatgactgcaaaaatctcatgcataaaaacagcgatgatcaaaatcaatctccaatgcttcttcggcgcaaacagtgccgcgaagatgacaatttgaaccagcagcgtcccccatgtcggaatcaccacgaacggacttgttacaattggcttcgttaacgcctgaaaaaagccgttgaagccaatggttttttcctgggcgaaataatagacggccgttccgtccacccattcctgctgagatagcttagcgacggtagagtgaaaataaagcaccgccacttggattctgatcacaaaataagaaataaaagctgttatttttccaagtgttcttttgccctctataggtctcgtactccaatgccattttctcggatcggtcagcgtgatgggaagcaataaaaaggtcatgactgctgctgcctgctcgcctccgtcgatgacgatcagcgatgactgcaggctgtaactgacataccaatgcagaaccccggtgattctggggcgccagccaatgacaacaagcaccagaatggcaatgcagacccatctgaaaagatttaacatcatatagttattttcgccgagacaaaagagactgagattcattttacaagctggatagctgctgatcccgctggctggcttcataatgaggctcgggtgattgatgagcagcgtcagcaggctggatagcgcaatgatgcttcgcgcgaggccatatacatttgtccacgggtttctttcgtcccatctggtgatggtctgttttatgttttcgagcatgagatcacaaccttgactatgctttttacctgataagacgaaggggtatatttagaatagctccaaggaacaatatcctctttcgtcaaatagtagctgccacaaagcagcgggcggggagcgggtgtttttaattgcacggttttggctttgcttttgcatgcgccgaggtccttttctttacatgctgtccactgttccttgccgacttggctgtagatcacgcccatttcaacgccttgtgaccgcccataccgatacaggccgaataggttgtcagccctcatattgggccatctgaccttggcgctggcattttcagcctcatataagccgattgcagtatcacgcggatttttgctaaaaaagccccagccctgagggaggatgctggacatgagaaatttggagtcctttgtcagcggaatcggggttgtccctaagctgccaataatagaaaacagaaatagcgaaccccaaaggattgaaaaaatgacaaaaaatgatatcgatttctgcattcgactgctccttttaacctgaagaatcgtttttacacttttcataatataaaaacatttatgtaataaaaaggttaaaaagtatgagaaattccatttttgttaaaaggaaaaacaggacattttacactgctatatgtgattgatatatagtgtttttttcgatatatttaaaccatgaaaacgaatcaagttaatgaccgctggattgttcaatttcgaaaagggattttcgagctggccatcctatccctactgcattctaaaccgatgtacggttatgagctgacgtcatccttaaaaaccacctcggctctggctatttcagagggagcgatttatccgattctgaaacgtatgaccgagaagggatggatcgaatttttttgggaagattcactggacggcccgaaaagaaagtattacaaaatgacacaaaaaggagaagaaatgttaaaagaacggctggagaaatacctggaaacccatcaagccttactgtctttatcgggggatttgctatgaatggacagcttatcattgaccgatacatggaggaactaaatgcagagctggagaatatgcctgatgtagagagagaaaacgctatcgacgaattaaaggggcatatcaccgctttcgttcaagacagaatcaaagccggccttagtgaagaggaactgcaggaagctgttgaatctgaattttctcatccgaaggagcttgccgaattgatgatgggtgatgggggagagacgaaaaggaggaggtctttattgggcaaaagctggctttcggtccttctcattgtcacgattatcgccctgccgctgctgccgtccgacttcagacatctgccgctggctgtttatttaatggtgctcgccggatatgtatggaagcggaaaaaattgatgatgtttgcaggtgtcagaaaaaacaaaatgcgctctcaaaaggagattgttacgatttcgcgagtcggtgcggtttatctgctgtttttagcagtggtgcttcttttgagcccgttcctcaatgcgcttgtcgtcctgctgctgattgcagtaagctgcgccgctttttttctttttcttaacatcaagtaatcttgtaggaggctgtaagatggaaatcagcatcaattatctattaattgtcatcgcgcttttattctttgtggttgcctattttgtcggaatcaaaaaacaaacctggatgctggctgggtttaacgaggcgcgtatacgggataaagaccggctggccagaatagcaggctactttttcttgaattccggtttgttcattttgctgaatagttttatctcatttcaaggtcaggagcagctcatacctccgcttatactggcatatggagcaggggttattatttatgtcaataaaaaattagtagagtagaaaaagaagggcagagcgaaatatctctgcccttcttttttgggaaaataagaacgaagcaccacatacaagtttttgtatttttgataggatgaagaaaaatggtagattccaaaataggaaggatgtggtgttttgcgcaacctgaccaagacatctctattactggccggcttatgcacggcggcccaaatggtttttgtaacacatgcctcagctgatcaaagcatcaaatacgaccatacgtatcaaaccccttcatacatcatcgaaaagtcaccgcagaagccggtacaaaacacaacccagaaagaatcgctattttcctatcttgacaagcatcaaacgcagtttaagctcaaagggaatgcgaacagccattttcgtgtttcgaaaaccataaaggatccaaagacaaaacaaacgttttttaaattaacggaggtttacaaaggaattccgatttacggctttgaacaagcggtcgcgatgaaggaaaacaaacaagtgaaaagtttctttggaaaggtgcatccgcaaatcaaggacgtctccatcacaccgtctatttctgagaaaaaagcaatacatgcagcaaggcgtgagctcgaggcttccattggaaaaatcgaatatcttgatggggaaccaaaaggcgaattatatatctatccacacgacggtgaatatgatctcgcctaccttgtgagactctcgacatctgaacctgagcctggctattggcattatttcatcgatgccaaaaacggaaaggtcattgagtcctttaatgccattcatgaaacggcaggtacaggaatcggcgtatcaggtgatgaaaaaagctttgacgtcagagaacaaaatgggcgcttttatttggctgacgaaacaaggggaaaagggatcaatacatttgacgcgaagaacctgaacgaaaccttgtttacgcttttgtctcaactgatcgggtatacgggcaaagaaatagtcagcagcacgtccgtatttaatgaacctgcggctgtagacgcacacgcaaatgcgcaagccgtttacgattattacagcaagacatttggccgtgattcttttgatcaaaacggagcaaggattacgtctaccgtgcatgtcggcaaacaatggaacaatgctgcgtggaacggtgtccagatggtatacggggatggagacggttcgaaatttaagccgctgtctggatcgctcgacattgtcgcgcatgaaatcacacacgcagtcacacagtattccgccggtcttttatatcaaggagaacccggtgcattaaatgagtccatttctgacattatgggcgcgatggctgaccgtgatgattgggagatcggcgaagatgtctatactcctggtattgcaggagattcattgcggtcattggaggacccatctaagcagggaaatccagatcattactcgaaccgctacacaggaacagaggattatggcggagtccatatcaattcgtccattcacaataaagcagcttatcttcttgcagaaggaggcgtgcaccacggtgtacaggttgaagggattgggcgtgaagcaagtgaacaaatttactatcgggctttaacatattatgtaacggcatctacagatttcagcatgatgaagcaagcggcgattgaagctgccaatgatttatacggtgaaggctcgaagcaatcagcttcagtcgaaaaggcgtatgaggctgtcggcattctatgagcaaacaaaaacagtcaggacacagagtctgactgtttttgtttgctcattttcttaaaaagaatatcgccaatgtacctggaccggcatgcgagccgattgctgaactgattggatgcataatgatttctttcggcttgaacgcttcctcaatcaggtgtttcatgtccgtggctttttctttgttcgcggcgtagctgatcccgacggtttgatcgctccaatcatccccgcgctctttcataagctcgatgatccgtttgaaaagtttcttctgtccgcggattttttccagaggcacaagcttgccgtcctccatctgaagcagcggtttaatattcaacaggccgccgacaaaagcggacgttttggatatccggccgcccctcgcgagatatgttaaatcatcaacggtaaaaatgtgttcaagctggctgcaaaagttctttacagacgtttcaatttcttgtattgtattcccgttgatacagagatcggcagcatgccggacagccagaccgtatcctaatgaagcgcatttggaatcaatgacccgcaaatcgaaatcggggaattcctccttcacttcattggcgatcattacagctgtctgatacgtgccggagagacctgaggaaaaggcaatgtaaagagcgggatcacctgtttcggcatattgcaaaaacacatttttaatcgtttgcggtgaggcttgggacgtcttaggcgtttctccattttgcatcgcttcaaatatttgatccgcatgaattgtgactgcatcttcgaattctttatcgccgagagaaaccctgagcggaataaagccaatgcctttttcttcaaaataagaacgaggcaaatcagtggcgctgtcagcgatgagatgaactgtcatattgcttcccttctttccgttatcgctcgttatcatgagagttaagccaactatatcatattaatttgccaaaatcgtgttcaaatatttgttttaagggaaaacataataaagaagaaagagcggaggaacatgccatggtactagatcaaacaaaaaaattactcatcgtcatcatcggcgctttactcaatgctgccgggctgaacttatttttgattccagcagatgtatatgccagcggatttacaggtgttgcccagcttttatcaagcgtcgttgatcaatatgcccccttttacatatcgacgggaacgctcttgttcctcttaaacattccggtcggtattttaggatggctgaaggtcggcaaatcgtttacagtgtacagcattttaagtgtcgcactcactactctgtttatggggatcctgccggaaacaagcctgtcacatgacattttgctgaacgcggtgttcggcggcgtcatttccgcagtcggtatcggcttaacattaaaatacggagcttcgacaggcgggcttgatatcgtcgccatggtgcttgcaaagtggaaggataaacccgtcggcacgtatttcttcattctgaacgggattatcatcttgacggcaggattattgcaaggttgggagaaagcattatataccctggttacactatatgtgacaacgagggtgatcgacgccattcacacccgccacatgaagcttacggcaatgattgtgacgaaaaaagcggacgaaatcaaggaagccatttacggaaaaatggtgcgcggcatcacaactgttccggcaaaaggagcttttacgaacgaacagaaagaaatgatgattatcgtcatcacgaggtatgaactgtacgatttagaaaagatcgtcaaagaagttgatccgaaagcatttacgaacatcgttcaaacgacagggatttttggtttctttagaaaagactgacgaaagcaggtggaagtcgtgaaacggctgcttgtgatgctcctccccgtgctgcttttgataggctgcgggaaagatgagcagacagaacccgataaggaggtatcaggcggaatggagaatcaagaggttgttttatctattgacgcaattcaggagcctgaacaaatcaagtttaacatgtcgctgaagaaccaaagcgaacgtgctattgagtttcaattcagcacagggcaaaaatttgaacttgtcgtgtatgattctgagcacaaagaaagataccgttattcgaaagacaaaatgtttacgcaggcttttcaaaacctgacgcttgaatctggagaaacatatgatttctctgatgtgtggaaggaagtcccggagcccggaacctatgaggtaaaggtgacatttaagggcagggcggaaaatctcaagcaggttcaggctgttcagcagtttgaagtcaaataagaggctatggcgagtcgccatagcctttttttattggagtttgtccagctgattttgaaattgatgcagctgttgacgttccgcatctgtcgaattggcatacgcagaagatacagcatttttggctctcagaatcgcttgctcctgatcgccttcctcaaagccgtttgtcaccatgaccgcctgttgaacaaatgattttgcctgctgaaacagttcatttctcatttaatattcaacctggctttcggccgagtctcgtgccgcggcatgctggtgagcttcttctaaagtagaccgatatggaaatcttgcggcgtgtagcccgatggagtctttaccctgctgaataaaccttctggatttgcttcgtttacccattttgagactgcccccttccatactttgacgagatgagtcgtcttcaatagtatggtggggcaaagtaaggtttatgagtgggaaaaattaatacggaccttctttaaagtgagaaatattctttcaaaaatcttgcaacgccgtcctcttcatttgtagccgttgttcggttggcaatctgcttgaccgcgtcaattccatttcccattgcaacgccgcagcctgcaaattcaagcatttccaaatcgttatcctcatccccgaaagcaatgatccgctccctcggcacgccgtaataatcgctgattttctgcaggccgaccgctttattcatgccgcttttgataatttcaatgacatgccacggtgcggcccatcttctatggtcgattacctcggcatgcacatccgataaatatgagcgtattgccggcacatcttcttcttttgcatgtatgagtacagacgtcacatcttcaccaagattttcccgcaagtctccgaccgttacatttgttgtgttcatgttaaaggcatctatcaggtgctcatcatggtaatgaaagtatacgtcgtcaatcacttcagcaagcacgttatgtacgttgtagctctcgctgatatccacgagctgtttgacaacatcaagcggcagtgacgtatgataccgtccccagctgtcgtcttgcggatgatggacaaatgctccgttaaaattgacaattggcgttgtcagctccatctgctggtagtacatggaacttgaacgatacggacggcctgttgagatgcagacataatgcccgtcatcttttaggcgctgtatcgtatgaagggtgttttcagatatggttttatcatcctttaataatgttccatctaaatctaatgcgattaaatagggttttgtctccatgaaaagctcctttaaccttagattttgcttgttttgccttacttacagtgtagctttttaccatctttattgtctacatgttacacttatgattatggttatcctaaggaggggcacattgtgatacaaattgagaatcaaaccgtttccggtattccgtttttacatattgtaaaggaagagaacaggcaccgcgctgttcctctcgtgatctttatacatggttttacaagcgcgaaggaacacaaccttcatattgcttatctgcttgcggagaagggttttagagccgttctgccggaggctttgcaccatggggaacggggagaagaaatggctgtcgaagagctggcggggcatttttgggatatcgtccttaacgagattgaagagatcggcgtacttaaaaaccattttgaaaaagagggcctgatagacggcggccgcatcggtctcgcaggcacgtcaatgggcggcatcacaacgcttggcgctttgaccgcatatgattggataaaagccggcgtcagcctgatgggaagcccgaattacgtggaactgtttcagcagcagattgaccatattcaatctcagggcattgaaatcgatgtgccggaagagaaggtacagcagctgatgaaacgtctcgaattgcgggatctcagccttcagccggagaaactgcaacagcgcccgcttttattttggcacggcgcaaaagataaagttgtgccttacgcgccgacccggaaattttatgacacgattaaatcccattacagcgagcagccggaacgcctgcaatttatcggagatgaaaacgctgaccataaagtcccgcgggcagctgtgttaaaaacgattgaatggtttgaaacgtacttataaagcacgaagttattaacaagagctgaatttacgttatactgtagaaaaaaggagtgagggaacgtggaagaagcattaaaagaaaacatcatgggcgccctggaacaggttgtcgatcctgagcttggcgttgatatcgtgaaccttggtttggtatacgatgttgacatggatgaagacggcttaacgcacgtgacgatgacactgacatcaatgggatgccctttagcgccgattatcgtggatgaggtgaaaaaagcattagcggaccttcctgaagtgaaagacacagaggttcacattgtatggaatccgccttggactagggataaaatgtccagatacgcaaaaattgcgcttggcattcaataaaacaaaagaggacagcctgacatgtgaggctgtccttttttacagctgaaaggagtgaaaggaaatgatgtacctgctggcagttttatgcccgccgcttgctgttttgttttcgggaaaaccgtttcaggccttgctgaatctcatattgacctgtatcttttggctgccgggcgcgattcacgcctgctttatcgtcgccgaccgccgtgccgaaaaacgggcaagaagataatttgggaaaatgaggatgcagtcatggtataatggtcataaaaacagcagggagagcactatgaaaaagaaattgcttgcattcgcgctttgtactggcgcgtatgcggccctgtttgcgtactctgtgcactcagagcaaaaaacagacacaagcgagatgacggatgtcagccgcctgatgcctgtaaaaataaagcagacagtgaaagggcaggaagaggaaacgctcattgacacagtcaaagaggcaaatcgaaaaaacataaaaatttcaatcgccggggcccagcactccatgggcggccatacatattatgaggacggcatcgttctcgacatgacgggctacaacaaaatcctgtcactcgatcaagagaagaaaaccatcagggtgcaaagcggtgcaacgtggaatgatatccagaaatacgtgaatccatacggactcgcggtaaaagtcatgcagtcacaaaacatttttacaatcggcggatctctcagcgcaaatgcacacggacgtgatattcgctacggctcgctgattgatacagtcaaatcattccggcttttaaaagctgacgggacgattatcactgtcactccaaaagatgatttgtttacggcggtcatcggagggtacggcctttttggcgtgattcttgatgtaacgcttgagctgacagatgatgagctgtatgtcatgaagacagaaaaaatgaattacagcacatactcagactatttttcaaagcatgtaaaaggaaatccagatgtccgaatgcatctggcgcgaatttcaacagcgaaaaaaggatttctgaaagacatgtatgtcacaaattacgtattggctgatcatcaggatcagctgccatcatacagcgatctcaaagaagatgagtatacgggagccacaaagtttgcactcggtttgtcaagacagtatgaatggggcaggaattggctgtgggacacacagcaatcctatttcctgagccaaaacggcacagagatttcacgcaataacgtcatgcggtccgaatcaaagtttcttgagtatgaaaacaatgacaacacagatgttttgcaagaatactttgtgcccgtgaaggagtatgggtcctatattgatgacctgagacaaacgctgtcggacgaagatctgaacctgctgaacattacgatccgctacgtgcagaaaaatgaaaaggccgacctttcctatgcgaaggacgatatgttttcgctcgtgctattaataaacgagggcttttcaaaagaagaccaggcagataccgcccgaatcatcaggcgcatgacagacgttgccatcaagcacggcggcagctattatctgccttatatgacctaccagacaaaagcgcaaatgagacaggcatatccgaaaagtgaagcgttttttcagaaaaaacgaacctatgacccgaatgagcgctttatgaattacttttatcagaggtataaataatggggaaaaacaaattaaaatggctgacattatcacaaagcagcgtgtttttcgcaagcagcttaatctttccgttttatattctgtttgtgaaaaatatcggctcaagctacacacagttcggtttttcctacggattgttcgggttgagcggagcgctcatttacccgctcctcggacggctgtctgaaaggtttgacagccgttattttctgcttctgaactcgtgggggatggctgttctgcttttatatgtcccgcatatcggaagcgtcgttcaagtgtatatcgtccaagtgctgttagggctctttggagcgatgcaaaagcatggagaaaaagtgctgatcgctaattttacagacagcggagagcgtggaaagaagattgggaattaccatttttggacggctgtcttttcagcagcagcaattatgcttgggggctttctcgctgactttttcacagtgcaaatgattttttatgcaagctctattctatattttttgagtggattgatgatgatgaaaacaggctgacgcggtcagcctgtttttttatgcggctgaaaagcggtgctgcatcaacgtttttgtgctggagttgtgctgatttttttgagcggaatttccattgaacagaaaatttataaatgaataaaaatattaaatatacgattgaattaatttttattcatgttataatgttaaataatttcacaaagaccaagagggtgaacttgttttgaaaataggaattgtaggtgctacaggatatggaggcaccgaacttgtcaggattctctcgcatcatcctcatgcagaggaatgcatactttattcatctagcggagaagggaatgtctatagcgagggttatcctcatcttaccggcttagcggatcagaagctgaagccgattgatatgaatacgatcaaacacgaaatagatatcatgtttctcgctgcgccgcccggagtctcaagtgaattgactccaaagctggcagatgtgggaattccggttattgatctgtcaggtgatctgaggatacaagaaccggctgaatatgaaaaatggtataaacggacagcggcaccgaaggcggtgatacaagaggcggtatacggtctggcagaactgaatcaactgcaaattcaacaggcgaaactcattgccaatccaggctgttttccaacagctgttttgcttggcctcgcgccattggctcaaaagaaactgctcgatgaatctttcgttatcgttgacgcgaagacgggtgtttccggagcgggaagaaaagcatccatgggaacccatttttctgagctgaacgacaattttaaaatttacaaagtcaatgaacatcagcacacgccggaaattgagcaggcgctgaatgaatggcagccaggcctcgggcccattacattttcggctcacttggttccgatgacaaggggcatcatggcgacgatgtataccagattaacctgtgatctatcagcagatgacctgcatgatttatattcggaattttaccaagattcatattttgtgagagtgaggccaaaaggtcagtacccgcaaacgaaagaagtgtacggcagcaatttttgtgatatcgccgtgaccctcgatgagagaacgaacagagtcacgatcgtctcggtaatcgataatttaatgaagggtgccgccggtcaggcagtgcaaaactttaatttgatgaatggctggaatgaagaaactggactcactatcacgccaatttatccatagaacgggagagaatcgaaccatgattcagttaagtgaagatcaaattgtaaaagtaacaggggatgtatcctcgccaaaagggtttcaggcaaagggtgtgcattgcgggctgcgctactcgaaaaaagacctcggcgtcattatcagcgagacaccggctgtgagcgcagcagtttatacccaaagccactttcaggctgctccgatcaaagtgacactagacagcttaaagcacggaccgacactgaaagccgtcatcgtcaacagtgccattgccaatgcctgcacgggagaacaaggcctaaaggacgcatacacaatgcgggagagttttgcttcacagcttggcattgagccggagcttgtcgctgtttcatcaacgggtgtcatcggcgagcatttagacatggaaaaaatccacgcggggatcgagctgctgaaagaaacacctgcgggatcaggcgattttgaggaagcgattttaacaactgatacggtgatcaagcagacgtgctatgaactggcaatcggcggcaaaacagtcacgatcggcggagcggccaaaggctctgggatgatacacccgaacatggccacgatgctgggatttgtgacaactgacgcggcaatcgaagaaaaagcgctgcaaaaggcgcttcgggaaatcactgacgtttcatttaaccaaatcacagttgacggagaaacatccacgaacgacatggtattagttatggcgaatggctgcgccgaaaacgagtgcctgacagaagaccatccagactggccggtctttaaaaaagcgctcttgctcacttgtgaggatctagctaaagagattgccagagacggagaaggcgcgacaaaactaattgaagcccaagtacagggagcgaaaaacaatcttgatgcaaacgtcattgccaaaaagattgtcggctcaaatcttgtaaaaacggcagtatacggaacagatgccaactgggggcggatcatcggagccatcggacactccgcagcacaggtgacggcagaagaagtagaggtttatcttggcggccaatgcctgtttaagaataacgaacctcagccattctctgaatctatcgccaaggaataccttgaaggagatgaaatcaccattgtcatcaagatggctgaaggggacggaaacgggagagcgtggggctgtgacctgacctatgactatatcaaaattaacgcgagctatcgcacgtaataaaggggagcgaaatgaagaaaacaatcgtttttaaatgcggtggaagtgtcatccgtgagctgtcggaggaattttttcaaaatctgaaagagctgatggcgtcaggctggaagctggcgatcgtacatggcgggggaccggaaatcacgaatatgctgaaacggttaaatatcaagacagagttttcgggcggacagaggaaaacaacgaagccggtgctggaagtggcggaaatggttttatccggttctgtcaataaatttttcgttgctgagcttgccaaacacggactgcgagccgcaggcatttctggtaaggatggaggtcttttggaggctgattatctagatccggaaacatacggagaagtgggagaaatcaaaaaagtcgatgcgtccatggtgaacgcgctgatggaaaatggcatcatccccgttattgcgccgctgtctatgacaagcgactgcaaaacgctgaatgtaaatgctgatctggctgcttcagcagtcgccggagcgcttgaagccgataagctgatgttcgtcacggatgtcgatggaatcatgaaggaaaagcaacgtctggacgtcctgacccctaaggagattcagatgctgatcaagcaggaagtgatcaccggagggatgatcccgaaggtcaattcagccttgtcagctttatcagatcaggtgtctgaagtcatgatcgtaaacggaaaaggttcattcttcgcagaacaaacctttcaggggacaaaaatcgtcaaagcaaaggaggctgtttcatgagcagcttgtttcaaacctacggccgttgggatattgacatcaaaaaagcaaagggaacgtacgttgaggatcaaaacggcaaaatgtaccttgatttcattcaggggattgcggtatcaaatctaggacactgccatgaagcggtgacagaggcagtcaaaaaacagcttgacagcgtatggcacgtatccaacctgtttcaaaacagtctccaagagcaagcggcgcagaagctggcagcgcatagtgcaggagatcttgtctttttctgcaacagcggcgcggaggcgaatgaaggtgcgataaagcttgcccgaaaagcaactggaaaaacaaaaatcatcacttttcttcagtcgttccatggccgcacgtatgcagggatggctgcgaccggacaggataaaatcaaaacaggcttcggcccgatgcttgaaggctttcactacctgccatacaatgatccttctgcttttaaagctcttggggaggaaggcgatattgccgcggtgatgcttgaaacagtgcagggagaaggaggagtcaatccggcgagtgctgaatttttatcagccgtacagtcgttttgcaaggaaaagcaagcccttctcatcattgatgaaatccagaccggcatcggacggacgggaaaaggcttcgcatatgagcacttcggactctcaccggatatcatcacagtcgccaaaggattgggaaacggctttccggtcggcgctgtcatcggaaaaaaacagcttggagaagcgtttacccctggttctcacggaacgactttcggaggaaacatgctggcgatggctgctgtgaatgccacattgcaaattgtattccagcctgactttttgcaagaggctgctgacaaaggggcgtttttaaaagaacagcttgaggcagagctaaagagcccttttgttaaacaaatccgaggtaaaggattaatgcttggaattgagtgtgatggcccggttgctgacattattgctgaattgcagacattaggcttgcttgtattgccggccggcccgaacgtgattcggctgctgccgccgctcaccgtgactaaggatgaaatagcagaagccgtcagcaagctgaaacaggcaatcgctcatcattccgctgtaaaccagtgatttttttttcgatgtaaaggcataaaaattcatttttataattaattattcatcaagaggtgggctgttagatggaaggttatttagtgttagaagatgggacatcgttcagcggcgagctggacggtcatgaaaactgtacgggagaagctgtttttttcacaggaatgacaggctaccaggaagtgctgacagatccatcatataagggacagattattgtatttacctacccgctgattggcaactacggcataaatgaaaaggattttgaaagcaagaaaccgcaagtaaaagccgcggttgtctatgaggcgtgtgatcacttttctcattatgaagcggtatacagcctcaaggagtatttacagaaatggaacattccgctgttaacccatgttgatacgagggctgtcgtgaagaaaattcgggcaaacgggacgatgggtgcaacagtcacagcctctaaagaaggagctgagattgcccttcaacccgagaatgtggcagagcaggcttcagcccaggaaatcagcacattcggcgacgggaataaacatatcgctctcattgattttggctataaaaagtcaatcgcatcatcacttgtcaaacggggctgcaaggtcaccgtggtgccatacaagcaaatggaggccgtatacaacatcaaacccgatggcattgtgctatcgaacggacctggagatccgaaagccattcagccatatttaggaaagatcaaaagcatcatcagccgctttccgactctcggcatttgtctcggacatcagctgatcgcgctcgcgtttggagggaatacttttaagctgccattcgggcacaggggagctaatcatccggtcatcgaccgtgagacgaaacgggtctttatgacaagccaaaaccacagctatgtggttgatgaacagtcgattaatgaagaagagctcacgatcaggtttcatcatgtcaatgatacgtcagttgaagggcttgcccataaaaaactgcctgtcatgagtgttcaattccacccggaagcccatcccggacctgcggaaagcgaatggatttttgatgattatctaaagaatgtgataccagcaaggagagaaatcgcgcatgcctaaagacaccagtatttcaagcatattagtaatcggctcaggcccgatcatcatcgggcaggcggcagaatttgattattcaggcactcaagggtgcatcgcgctgaaggaggagggctaccgggtcattctcgtcaacagcaatccggcgacaattatgactgatgaagccttcgctgatgaaatttattttgagcctctgacagcagaaagcctgacagccatcattaagaaagaacggcctgatgggcttcttgccaatttaggcggtcagaccgcgttgaatttagcggtggagcttgaagaaacgggtgttttaaaagagcacggcgtcaaactcctcggcacatccgttgaaacgatacaaaaaggagaagaccgggaaaaattccgttcgttaatgaatgaattaaaacagcccgtgccggagagtgaaattgttgataacgaggccgatgccctccattttgcggaatccatcggttttcctgttattatcagaccggcttacacattaggcggaaagggcggaggaatcgcccctgataaagaagcctttacagctatgattaaacaggcgctattagcaagcccgatcaatcaatgccttgtcgaaaaaagcattgccggctttaaagagattgaatatgaagtcatgcgtgacagcaataacacatgcattaccgtctgcaacatggaaaatatcgatccggtcggcgtgcatacaggtgactctatcgttgtggcgccttcacaaacattgacagatgaagactatcaaatgctgcggacggctagtctgaccatcatttcagcacttgatgtcgtaggcggctgcaatattcaattcgcgcttgatcctttcagcaagcaatattacgtgatcgaagtgaatccgcgtgtcagccggtcatcggctctcgcatctaaagcgaccggttatccgattgcgaagatggccgcgaaactggcagtcggatacacacttgacgagctgaaaaatccgctcacaggctcaacttacgcaagctttgaaccggcactggactatgtgatcgtcaaatttccgcgctggccgtttgataaattcaaaaacgcagaccgcaagcttggcacaaaaatgaaagccaccggtgaagtgatggcgattgaacggaatttagaagcagcaatacagaaggcagccgcgtcgcttgaattaaaaaatatcgggacacaccttccagagctcagcggcttgtcaattgatgcgctatgggagttggcagtcactccggatgaccgcagatttttcgttgtcatggagctgttgagccgcagcgtctcgattgatgacattcatgcgaaaacaaaaattgatccgtttttcctgtatacctttaacaacatcatcaaattggaaaaccgcctgatggaagagggcggcgatctctcttttgacttattgaaaaaagcaaaggaaaaggggttctcagacgcaacgattgcctcattgatcggcaaaacagaggaagaggtgcgcgcgcttcgcaaggagatgggcattacaccttccttcaaaattgtcgatacatgcgcggctgagtttgatgcgaaaacaaactatttttactccacatatttcggagagaccgatggagatatcagccgcaaagagaaaaaacgcgcgctgattatcggatcaggaccgattcggatcggccaaggcgttgaatttgattacagtgcggttcacggcgtgctgacactgcaagagcttgggttcgaaaccatcatgattaacaataacccagaaacggtcagcaccgattatgaaattgcggatcgcctgtattttgaaccgatgacaacggagcatattgtaaacgtggcggagcaggaaaatattgattttgcaattgtgcaattcggcggccaaactgcaatcaatgctgctgaagcgctcgaaaaagccggcattactcttcttggcacatcatttcaaacgctcgacgtgttagaggatcgggatcaattttatcagcttcttgacgagctgggattgaagcacgcaaaaggagaaattgcttatacaaaagaagaagccgcttcaaaagcgagtgagatcggctatccggtgttaatccgcccatcttacgttatcggcggaatgggcatgatcattgttgactcgcaagcccagctttctcagctgctgaatgatgaggacagcatgccatacccgattttgattgatcagtatgtgtctggaaaggaagtcgaaattgatatgatttccgacggcgaggatgtctttatcccgacatataccgagcatattgaacgggcaggtgtccattcaggggacagctttgccattcttcccggaccgtccatcacgagcgggctgcagcagggcatgaaagatgcggcacaaaaaattgcccgaaaactttcatttaaaggcatcatgaacattcaatttgtgatcgacaatggaaacatactcgttcttgaagtgaatccgagagcgagccgcacggtgcctgtcgtcagcaaagtaatgggcgttccgatgattccgctcgccacacgactgctggcgggagcgtccttaaaagatctaaatccggaagttcaaaatcatcatggagttgccgtgaagttccctgttttttcttctcatgcaatccaggatgtggatgtcaagcttgggccggaaatgaaatcaacgggagaaggcatgtgtgtcgcatatgattctaacagcgccttgaaaaaaatctatacaagagtctggagtcaaaaaggaagcatttatttgcaaaacgttccggaagaagtgaaggagttagcagaaaacgcaggttttacaattcatgaagggacatttgcctcatggatggaacaggaaggaaaatcgctccacatcaatctgagcggttctgaagaagcacgcaaagaacgtttggaagccatgacgcacggcatccccgtctttacagaagaagaaactgtgcgggcgtttttacaaagcggttcaggccatccgcagcctgtatctctcaaagacctctataaaaaggaagtggcatcatgcacacagtgacgcaaaccagtttatacggaaaagatttattaacgttaaaggaccttagtgaagaggatataaacgccttgctcgcagaagccggtgagctgaaacaaaacaaaattcagcctatattccatggcaaaaccttggcgatgatttttgaaaaatcatcaacgcggacccgtgtttcatttgaagcgggcatggcgcagctgggcgggaacgccctctttctaagccagaaagatctgcagctggggcgcggtgagactgtcgctgatacggcaaaagtgctgtcaggctatgtggatgccatcatgatccggacctttgaacatgaaaaggtggaggaacttgccaaagaagctgacattccggtgatcaatggacttaccgataaataccacccatgccaggcgctggcggatctcttgacgattaaggagataaaagggaagcttaaaggcgtaaaagtcgcatacatcggtgacggaaataacgtggcgcactccttgatgatcggctgcgcgaaaatgggctgtgatatctcgatcgcttcgccaaagggatatgaagtgttagatgaagcagctgaagcggcaaaaacatatgcacttcaatccggctcttctatcacgctgacagatgatccgattgaagctgtaaaagacgcggatgtgatttattctgatgtgtttacaagcatggggcaggaagcggaagagcaagaacgtcttgctgtctttgcgccttatcaggtgaatggggcgctagtcagccatgccaagcctgactatacatttttacattgtctccctgcgcatcgtgaggaagaagtgactgcggagattattgacgggccgaactctgcagtgttccagcaggcggaaaaccgtcttcatgtgcaaaaagcactgctgaaggccattttatataaaggggaatcatcaaaaaactgctgagccaaactcagcagtttttttgatggcaacatattcacagccgcttaggcgcatactacagcaaaaaggaaaaggaggaaaaacagtgggacagcagcaccaattccggcccggacagaaagcgcctaataacggtgtctacgtagaaatcggcgagacagggagcatggttaaaaaccctcaaaaggtccatctgtcagcaggggaaatgttccccgaaacatcaaaccacaaccggctgtggacctacaaaagaaagccgtgaccactaaaaaacccaaaacaataaatgttttgggtttttggctttttaatgctggcttgcatttttgttcataggcatgatttctgctaaaaccatgattaagacatacagtacaacagcaatgacagatgatgttttgaaattatacgtaacgctgttcatgcttgcaaccaagtagcatgccatatgtgataaaaggaacgtccaaataaaggcaataatatatcgcacgtttccacctcgtccttctcattctattctaaaagttatcataccatacaaaaagcgaagggggaatccaattttagcagaaagtgaggtgacaaaagagtctgattcgtcacactttaatggtaaaatataaaacgtcaatcagtataatagccaaaaatgtaaaaggctaggactttaccttattcgtttcttttctatttacataagatagcgtgagatgaagtgtgaaaggaggcgggcaagcgatgggaataacggaaagatactttcaactgggaacggagcataatgtcattcatctgccctatcgcccgaacggcttcggcatctttatcttgggggacagaacccactttgtcggacatgattcaagcttttggcagcagcattatggcagaaatcagcttctgagcatgttgatgaatgaaggatacactctttttaacagcaatctgttcggaaggcattggggggcggaaaaagcagtcacctatgccaaacagctgatacattctgtactgaagcaggaaatcctcaatccgaagattcatattttagcagaaggcatgggtgctctcgtggccgatgaactgcttcgtttttccccggatcatatccgctcagccgcaatgttgaatccttgtctcgatcttcaggcacattatgaatcggaaaaagaaaataaatttttctataaacaatttttgaaagaagtatcgaaaagctacggaatttctgaaaaagaagcggaagcgcttcgttataaaacaattcaaagctacccgagcggcgtaccggttcatatatggcagcgtatgaccggatctccatatccctacagtgtacatgcagaagttttcaaggaaaaacagcaaaagcaaggctcaccggtcgacatgacatttcatttatttgagcatccaagcagaatttatgcatcaatttgcaaattctttcacagtcatgaaaaagaattatagagaatataatgacaacagccttctcttttgcggaggctgttttgttttgggaaatgaaaaaccggaagggcggcagatgcaatggaatcaacgctgattgtaggtgcggacgaatttttcggcctttcattatgtgagcgaatgatggatgaaggcatacatgttgacgttgttctggcggaaacagaagataaaatgagacaaatgtacttagaagaaagactcatgtggcttgggagaaatgaactctttcgccagcttgaacacattggagaccaaaattatgatacaatttgtatccagttcggaagttttttgcctttagaccaatgtgattctccttatattttagtatatgaagaagaccgaaaagaatgggaaaaacgtgaaaaaacaggctcggaaaaaaccgtgatcctgccgaaaatgtatgggccatggaaagaagaaacagaggaagacggctattatacaaatgacgtcgctgacgagttgctgagattcctgttagaaccaagccgtcatagcaaagatcagctttttgaattgcaagtcacagaaaaaacctcaaaagaagaagcaaaaacaaaaattatcgagtggaaaagacaattttcatcaattttcgacaaatattaagaaaaaccttccatgtttcgagttttctagatacaataaacgtataaaaataaacatgttatagcttgtcaaaaggagttgaacatgacttgatcacaaggcttgtcatgatcttttctgtcctccttttattgagtggatgtggacaaactccgttcaaaggaaaaattgagaaggtcggcatgctctttcctgatacgattaatgacctcgtatggggcacaaaagggtataaaggattactgaatatacaatccaaatacaatgtggacgtctattataaagaaggcgttaaaacagaagaagatatcataaatgcgattgaggattttcataagaggggcgtcaatctgctctacggccatgggagtgaatatgccgaggtgtttaacttggtcggcgaagattatccagatatggaattcgtcatttccaatgcgaaagcgaaagctgataatgtaacaagtgtccattttagcggggaagcaatgggcttttttggaggaatgactgctgcccatatgtcgaaaacgaatcaggtcggtgtaattgcttcctttacgtggcagcctgaggttgacggttttatcaaaggggccaagtatgaaaatccggatatagaggtaaatacgaaatatacggatcattgggatgatgatacaacagcagtaaagctttatcagaaaatgaagaacgaaggcgcggatgttgtgtatcccgccggagacgggtataatgttcctgttattcagcaaatcaaaaaagacggtctttatgccattggctacgtcacagatcaatcggatctgggcgagaataccgtattaaccagcacggtgcaaaatgtggacaaggcctatgaaatcattgctgaacaatttaataaaggcacccttgagggcggcgatcattactacgacctgaatacgggagtcgttgagatgggaacattcagcccgctcgtcgacaaagactttcagcaaagaatcgccaagctgatcaaaacatacaacaaaacaggcgagctgccaaaaaacgagtaatggagtgacgtcacatgcagcacgaaaaatcacttgaattcttgcaaattgccatgaaatatctccctgaagcgaaagaacagcttgagaaatcaggcattgagctctcaatggaggccatccagccgtttatgaatctatttacaacggtaatggcggaagcttatgagcttggcaagtctgacgctaaatctgaaacagaataagaagaagccacttttttgaaagtggcttttcacatgattttctttttaatagcggagagcatgggcgcaagctcctttaaagcgggcttgatttgatcaagagagttcataattgaaccgatttggtccataatatgcatgtaattaatcgtctcttcgtcgtttgtctgagaaacctgagaaacttcctcttgttgttcctcctccttctcttctgttggttttgctgcatcgccgaacatcattcttgaaaacacatccaactgcatacgcctcctttccatataccatactctatgagtaagatgaactgatagtttagacgaatatattgccatgtgaaaaaaaataggatagaattagtacctgatactaataattgatcacaacctgattgatcttctaaatttaagatataaaggagtcttcccttatgaaagctggaatacttggtgttggacgttacattcctgagaaggttttaacaaatcatgatcttgaaaaaatggttgaaacttctgacgagtggattcgtacaagaacaggaatagaagaaagaagaatcgcagcagatgatgtgttttcatcacatatggctgttgcagcagcgaaaaatgcgctggaacaagctgaagtggctgctgaggatctggatatgatcttggttgcaactgttacacctgatcagtcatttcctacggtctcttgtatgattcaagaacagctcggcgcgaagaaagcgtgtgctatggatatcagcgcggcttgtgcgggcttcatgtacggggttgtaaccggtaaacaatttattgaatccggaacctacaagcatgttctagttgtcggtgtagagaagctctcaagcattaccgactgggaagaccgcaatacagccgttctgtttggagacggagcaggcgctgcggtagtcgggccagtcagtgatgacagaggaatcctttcatttgaactaggagccgacggcacaggcggtcagcacttgtatctgaatgaaaaacgacatacaatcatgaatggacgagaagttttcaaatttgcagtccgccaaatgggagaatcatgcgtaaatgtcattgaaaaagccggactttcaaaagaggatgtcgactttttgattccgcatcaggcgaacatccgtatcatggaagctgctcgcgagcgtttagagcttcctgtcgaaaagatgtctaaaactgttcataaatatggaaatacttctgccgcatccattccgatctctcttgtagaagaattggaagccggtaaaatcaaagacggcgatgtggtcgttatggtagggttcggcggaggactaacatggggcgccattgcaatccgctggggccgataaaaaaaggtgaggtgcacacaagatgactaaaaaaagagtagttgttacaggacttggagcattatctccacttggcaacgacgtcgatacaagttggaataacgcaatcaacggtgtgtccggaatcggtccgatcactcgtgttgacgctgaagaatatccggcaaaagttgccgctgaattaaaagaatttaatgttgaagattatatggataaaaaagaagccagaaaaatggaccgctttacacaatatgcggttgtggctgcaaaaatggcggttgaagatgcagagcttaacattaccgatgagatcgcgccgagagtcggtgtttgggtaggctccggtatcggaggacttgaaacactagagtctcaatttgaaatcttcttaacaaaaggcccaagacgggtaagcccgtttttcgtgccaatgatgattcctgacatggcgacaggccagatttctattgcattaggagcaaaaggggtgaattcttgtacggttacagcatgtgctacaggaacgaactccatcggtgacgcgtttaaggttattcagcgcggtgatgcagacgtgatggtcacaggcggaacagaagcgccgctgacaagaatgtcattcgccggctttagtgccaataaagcgctgtctactaatccagatccgaaaacagcgagccgcccgtttgataaaaaccgtgatggctttgtcatgggggaaggtgcagggattatcgttcttgaagaacttgagcatgccctggcccgcggcgctaaaatttacggagaaattgtcggctacggctcaaccggagacgcttatcatatcacagcgccggcccaagacggtgaaggcggagcgagagcgatgcaagaagccattaaagatgcaggcattgcacctgaagaaattgattacatcaatgctcacgggacaagcacgtattacaacgacaaatacgaaacaatggcgattaagaccgtttttggcgagcatgcgcataaacttgcggtaagctctacaaaatcgatgacaggccacctcttaggagcagccggcggtattgaagccattttctctatcctggccattaaagaaggcgtgattccgccgacaatcaatattcaaacacctgacgaagaatgtgatttggattatgtgcctgatgaagcccgcagacaggaacttaattatgttctcagcaactcattaggattcggcggacacaacgcaacattaatctttaaaaaatatcaatcataatcaagccaaaccggctgcccttaaagggtagccggttttttttgtgtgcataggattaaaagaggaggcgatcacatgagtgtagaacaaacatatagctggctcaggaaggccggttcaatagatgatttggcgcattacattatcccgcttttttcaggtgcggagaaaaagaactggaagggcattctggggcatcttcagcatcatgggatgtttaaaaacataaaagagggtattcagacggtttccaagctgaaggaaaaaggtttttacggacatatccaaaaggaagaacagtacctcaaaaacaaatggcaaggtcctgatgtaccaattgttacgctgccggttgatgaacgaaacaggagaatccgtttagaattcggatcaaaatcaggactcgcctttcaagacaaaatgttcctttttctttcgtcagatttagattttgggtcggtatctgcccttatgacgcatgagtatcatcacgtttgccggttaggtcatctgacaaaagaggaaaaggatgtcacattacttgatacaatcatcatggaagggctggcggaatatgctgtttatgagaggttcggccgaagtcaaacggctgaatggacgacttggtatacaccggaacagcttcaggctttatatgaaaaaaagattgcgccccatcgggatatcaaacgggataatcgattatttccccagctgttattcggcaaaggatatcagccaaaaatgcttggatacgcagttggattcaatattgtaaaaaaatatttaaccgccagcaaggcaagcaccgcagacgggctgtccattcctgctgagacctttttggatgcaatgctttaaaaggataaaataatggaatttcattaataatattacatttatcctaaaaaattcttgattttgcaaaatgattgtaataatatacaactataaaatttttcgataattcaatattatttattatttctgaataaagggattgctttctcttgaaaacgtttgacaacaagaggggggaaaggggagctagcatgagcacacttttagaagtgaataatttaaagacttattttttcaggaaaaaggagccgatccctgcggttgacggagtcgattttcacatcagcaaaggcgaaaccgtcgcgcttgtaggtgaatcgggctccggaaaaagcattacttctttatcaattatgggcctcgtccaaagctcaggcggaaaaatcatggacggctctattaaactcgaagacaaagacctcacctcattcactgaaaacgattattgcaaaatccgcggtaacgaagtatccatgatctttcaggaaccaatgacctcccttaatccggtgttaacaatcggagaacaaattaccgaagtgctgatttaccataaaaacatgaagaaaaaagaagcccgtcaacgagctgttgaactcttgcagatggtcggtttctcccgggcggagcaaattatgaaggagtacccgcatcggctgtccggcggtatgagacagagggtgatgattgccatcgcactgagctgtaatcctaaactgctcattgctgatgaaccaacgacagcgctggacgtgacaatacaagcccaggtgctggagctcatgaaagatctctgtcagaagttcaatacatcgattcttctcatcacacacgacttaggtgtcgtgtctgaagctgccgatagagtgattgtcatgtactgcggacaagtcgtagaaaacgccactgttgatgacttatttttagaaccgcttcatccgtatacagaaggcctgcttacgtcaattcctgttatagatggagagattgataaattaaatgcgattaaaggcagtgtgcctacaccggataatctgccgccggggtgccgttttgccccaaggtgcccgaaagctatggataagtgctggacaaatcagccttcgcttttgacacacaaaagcggaagaacggtgagatgctttttatatgaggaagagggtgccgaacaatcatgacagcagctaatcaagaaacaatcttagagcttcgtgacgtaaaaaaatactttccgatccggtcaggcctttttcaaagaaaagtcggtgatgtaaaagcggtggatggtgtttcattttcgttaaaaaaaggagaaacactcggaatcgttggagagtcgggctgcggaaaatcgactgccggcagaacgatgatcagactgtacaaaccgacagagggccaaattctttttaaagggcaggatatttccaatctgtcagaggagaagctgcggaagagtgtccgcaaaaatattcaaatggttttccaagatccatttgcttcgttaaacccgagaaagaccctgcgttccatcataaaggagccgtttaatacgcacaacatgtataccatgcgtgaacgaaacgaaaaagttgaagagctgcttgcaagagtagggcttcacccgtcgtttgccggccgttatccccatgagttttcaggcggccagcgtcagcggatcggcattgccagagcactcactttgaatccagagctgatcattgcagatgagccggtttccgcacttgatgtatccattcaggcccaagtgattaacttgatggaggaattacaggaagaatttaatcttacgtatctatttatctctcatgatctgagtgtcgtccgccatatcagcgacagagtcggagtaatgtatcttggcaaaatgatggaactgaccggcaagcatgagctttatgacaacccgcttcacccatatacccaagcgcttttatcctccgttccggttacaagaaaaagaggttctgtcaaacgtgaacgcattgtcctgaagggagaactgcctagtccggccaacccgccaaaaggctgcgtattccacacaagatgtcctgttgcaaaaccgatatgcaaggaacaaataccagaatttaaagaagctgctcccagccactttgtggcttgtcacctttatagctaatgttgcccgcacagctttgagagggggtatgcacactacataaacaacagcctagaagaacgaacatttcaagagggggaatatctaatgaaaagacggaaaaccgcactgatgatgctaagtgtattgatggttctggccatctttttatcagcctgctcgggatcaaaatcaagcaacagcagcgcgaaaaaatcagcaggcaaaccgcagcaaggcggggatttggttgttggttcaatcggagcgccaacacttttcaactcattatattcaacagatgaatcaagtacagatattgaacaaatgatttacagctttttaacgaaaaccgatgaaaacttaaatgtcaaaatgtcactggcggaaagtgtgaaagagctggatggcggattgaaatatgacgtaaaaatcaaaaaaggcgttaagttccatgacggagaagagcttactgccgatgatgtcgtctttacgtacagcattccgcttaacaaggattacaaaggagagcgcggctctaactttgaaatgctgaaatcagtagagaaaaagggagattatgaggttttatttacgctgaaatacaaagaccctaacttctataacaatacgttagacagctacgggattctgcctgagcacattttaaaagatgtaccggttgcagagcttgaagataacgaatttaatagaaaaaatccaatcggctcggggcctttcaaatttaaagaatggaaagacggacaatacgtgaagcttgttgctaatgatgactactatgacggccgtccgtatttagacagtgtcacgtataaaatcattcctgacgccaatgcagcagttgcccagcttcaggccggagatattgatttctttaacgtgccgtcaactgactataagacagctgaatcgtttaataatgtcaaagtcgtaacagatttagcgttaagctatacgtatatcggttggaatgagaaaaatgagctgtttaaagacaaaaaagtgcgccaggcgcttacgacagctttagaccgtgaaacaatggtgcaaaccgtattagatggggacgggaaggtcgcttatatccctgaaagcccggtttcatggaactatccgaaagatatagaggttcctaaatttgaatacaacgtcaaaaaagctaagaagatgctgaaagaagccggctgggaagatactgacggtgacggcatcctcgataaagacggtaaaaaattcgagtttacactgaaaacgaatcaaggaaataaagttcgtgaagacattgcagttgttgttcaagaacaattgaagaaagtcgggattaaggtaacgccgcaaatcgttgagtggagtgcattagtagaacagacaaatccacctaattgggactatgacgcaatggttttaggatggagtttatcaacgttcccagaccattacgatatcttccattctagccagtctgaaaaaggcttaaataacatgtggtacaaaaaccctgaagttgataagcttctcaaagatgcaaaatcaatcagtgaccgtaacgaatactcaaaagcttacgaaaagatttaccaaaaacttgctgaagatcagccgtataccttcctttactatccgaacaaccatatggcgatgccggctaacttagagggttatgtgtatcatccaaaacgcgagttgtaccaaattgaaaaatggtggcttgcccaataatttataattttcccttgcaggggagggagtgcgtttccttcccctttgaatttgaaaaagaacaacgaaggggacaagaatatggttacatatattattcgaagaacgttatcttcgattcctattcttttgggaattacaattttgtctttcattattatgaaagccgctccaggggacccgatgacacttatgatggatcctacgatcagccaggcagacagggctcagtttattgaaaagtacggtctcaatgaccctgagtatgttcaatatttaaaatggctgggcaatatggttcaaggcgatttcggcacatccatcatcagaaaagggacgcctgtttcagaactgattttagcacggctgcccaacacactcctcttgatgctggtgtcaacaattttggcgctgatcatttccatcccattcggggtaatttctgcaaaaaaaccttattcgaagctggactacggcattacatttacttcatttatcggtttggcaatcccgaatttttggttcggtttgattttaatcatggtgtttgccgtgaatctcggctggtttccaaccgggggagtcgccacccttaactcagatttcagtatagtagaccggattcatcatttgcttttacccgcttttgtgctggcgacagctgatatggcaggcttaacgagatatacaagatccaatatgcttgatgttttaaatcaagattatatccggactgctagatcaaaaggtttcaaagagaatcgagtattatttaagcacggcttgcggaatgcactattgcctgttattacgattttcggcttaatgattccttcctttattggcggagcggttgtcgtagagcagattttcacttggccgggattaggaaagctgtttgtcgattcagcattccagcgcgattatccggttatcatggcaatgactgtgatctcggcggttcttgtcgttgtcggaaacctcattgcagacatcctttacgcgattgttgatccgcggatcgaatattaaaaggagggaaacagagatgtcagagctgcaaacaactccctcgccggagatcaggctgaaagaaaatatttcgaaaaagccagaaacaatgacaaagattttctgggaaaaattctcgaaaaacaaactggccattttaggtgccgttattctttttatcattattatgtctgctgttttcgcccctttaattgcaccttatccccaagagcagcaaagcctgcttgataaatataaggcgccgggccttgaacatctgatgggaacggataaatttggacgtgatattttcagccggatcctatatggagcgcgtgtctctttattggttggatttgcgtccgtagtcggttcgattttgatcggaacggttttaggagcattagccggatatttcagaggaatagtggatgctgtcattatgcgtgtagttgacattgtgttatccattcctgatattttcttgttgatcacgctggtcaccatcttcaagccgggtgtggacaaactgattttaattttctgtctcacaggatggaccacaacagcacgattagtaaggggagaattcttgtcgctccgttcaagggaatatgttcttgctgctaaaacaattggaacaaaaacgcacaaaattattttttctcatatcctgcccaatgcgttagggccgattatcgtgtcagctacgctgaaagtagggtctgttattctagctgaatcggcgctaagctacttgggctttggaatccagccgccaatcgctagctgggggaacatgcttcaagacgcacagaatttcacagtaatgattcaagcatggtggtacccgttatttcccgggctatttattttaatgaccgttttatgcttcaactttgtcggtgatggcctgcgggatgcgcttgacccgaaaaatattaaataaaaatgaatatcatatctgttataaaatatcaccaaatcagaaaaaaagcaggtctccttttgtcagaaaatatacaaagagatctgctttttatgattcttacataaacccactgattccagatttcctcaatctctttggaataatttctctatcccttgcctatactgtggacaacagtttttataaaagtgaggggttagagatgttatttcttcatgatgtgtgggtcaattggtttgaaggggaagaaaatggctacaatgtatgccactttcacgaatggcgcaaggaagatacggttgagcttttggatcaggtgccgctgttaagggtgccgtcagtactgtttcattacatagaaaacgatttgtcagagcttccgaaaggtttgcttgaagacgtacatcagaaatcgtacattcggaaaaatcatgagcggacaaagcttgagtattgttttgtcgtaacagacggaatcggcattttagctgtcgacacgatcggctacacgatccctgtcagaaaaagccgtctgatcccaagacaggagcagctcgtttatgaaatggtaaaagatgtagagcctgaaacatatgaatttgagccaaagaagctggaatcctccaaggaatatcacatcttatcattagcaccagaacatgtcagaggactgacaagaaaagaacggcaaatcaagcagctgatgtttatggcgcttgaccaattaaaagggctgaaaaaccgggcggaaattggttactggtacacagagtggaatccgcatatgtatgaacaaatcaaaaggatgagctttgaagagatttgggacatgctgtataacgaaacaattgaaggctggtcggacaagcacctagctttttgcgaaaacctaataaaaggacagccttttttcgaaaagctttgggaaatggaaaacgaatcaaaggtcaactgaaaaaaaccgctctttgcaaagagcggttttttgattagcgtctttttcttccaagacccatggcattctccatttttttcagcattttgtttgctgtccggttcgcccgttccgcgccttcatcaagaatccggtctaattcttcagattctatcagctcataatagcggtcctggatcggttttaatgcgttcaccacgacttctgccaaatcacctttaaactcgccgtagccttttccttcgtactttgcttcaagctcttcaattgtcgtattgccgaggattgaataaattgtaagaaggttggaaacgcccggtttgttttccttatcaaatttgacaatgccttcagaatccgttacagcgcttttgattttcttttcaagctgcttcggctcatccagcagggtaatataagctttctggttcggatcagatttgctcatcttcttcagcggatcattcagagacatgatgcgtgcaccgacttttggaattttcacttccggaatcgtgaagatgtcgttgtattttttgttgaagcgttctgcgagattccgcgtcagctcaaggtgctgcttttgatcctcaccgacaggcacgagatccgttccgtacagcagaatatcagcggccattagcggcggatatgttaacaggccggagacgacagcttcattgcctttggatttgtccttaaattgagtcatccgctcaagctcgccgatatatgcgacacactgcatcatccatccggcctgcgcatgcgcggggacctctgactgaataaacaatgttgctttttctggatcaagtccgacagctaagtaaagcgctgcgagattgcggatattctttctaagctcaagccggtcttgaggaacagttatcgcatgctggtccacgatgcaaaaatagctgttataatcatgctgcagttcgacaaactgcttcattgcaccgatatagttgccgagcgtcactgagccgcttggctgaatgcctgaaaaaatcgtttgtttcatgaaaacatcaacctcatttcttaaaacataataaaaaaggctcattcttcccctgtaaaaaagggacgaatgaaccgtggtaccaccctgattattccattaaaatgaaatcactctgacgtttgtaacggagactgctccggctgagcctacttttttccagttcggtcagctgctccaaagtccattccacattgcccgttatctgctcccagcaccgcagactctcttcaaacaggtgaaatgtgtactactctttttcatagcaagcttttcttttgattgcttcattataaatcaattataaccaattgtcatcatgaaaaaacattcttttttccagtaaaattgtaataatataaataacacgagtgttgtaaaatccttaaatgataactgctatcagcgtaaaaacaggcagatattatatgtaaaaagcaatatgggcagaagacacatgaaaaagtttttaatcaatttatgctttaaatggtagaaggatattatgttcatggaagaaaaactaacgaagtttaaatattttaaattgataaaataatattgcaataaattatttgtttcattataatgaacttgttcactctattgttacagcttttttacaaaaataatcagaaaagacggaacagaataaaagtttgtgaaaactcaggttcatttgtctgatatttctgaggatttagccgtaaggagctgaaaattattattagggggtttgcgaatatgaaaaaacgttggtcgattgtcacgttgatgctcattttcactctcgtgctgagcgcgtgcggctttggcggcagcggatcaaacggtgaagggaaaaaggacagtaaaggaaagacgacacttaacattaatattaaaactgagccgttctccttacatccgggattggcaaatgattcagtttcaggcggtgtcatccgtcagacttttgaaggattgacacgcatcaatgcagatggggagcctgaagaaggcatggcatccaaaatcgaaacaagcaaggacggtaaaacatatacattcactattcgtgatggtgtgaaatggtctaatggagaccctgtaacagcacaagattttgaatatgcttggaaatgggcgcttgaccctaataatgaatcacaatacgcttaccagctctactacataaaaggtgctgaagcggcgaataccggaaaaggcagcctagacgatgtggcagtaaaagctgtgaatgacaaaacgctgaaggttgaattaaataacccgacgccatatttcactgaattaactgcgttctatacgtatatgccgatcaataagaaaattgcagagaaaaataaaaagtggaatacaaatgccggagatgattatgtatcaaacgggccgttcaaaatgacggcatggaaacacagcggttctattactctcgaaaaaaatgaccagtattgggataaagacaaagtcaaactgaagaaaatcgatatggttatgatcaacaataacaatacggaactaaaaaaattccaagctggcgaacttgattgggccggtttgccgctcgggcagcttccgacagaatctctcccttccttgaaaaaagacggttctttacatgttgagccgatggcaggtgtgtattggtacaaattcaacactgaagctaagccgttagacaacgtcaatatccgtaaagcattatcttatgcgattgaccgtcaatcgattgttaaaaacattacgcaaggtgaacaaatcccggctatggctgcggtgccgccgacaatgaagggatttgaggataacaaagaaggctactacaaagacaacgatgttaaaacggcaaaagaataccttgaaaaaggcctaaaagaaatgggcttaagcaaggcatctgaccttccgaaaatcaaattgtcttataacactgatgatgcacatgcgaaaatcgctcaagctgtacaagaaatgtggaagaaaaatttaggcgttgatgttgagcttgataactcagaatggaatgtctatattgataagctccacagccaagattatcaaatcggccgtatgggctggcttggggacttcaatgatcctatcaacttcctagaattgttccgtgacaaagacggaggaaataacgatacaggctgggaaaacccagaattcaaaaaattgctgaatcagtcacaaactgaaacagatcaaaacaaacgtgcagagctgctgaaaaaagcggaaggtattttcattgatgaaatgccggtagctccaatttatttttatacgattccttgggtacaagacgaaaatctgaaaggaactattattactggaactggagaaatttacttcagaaacgcgtactttcaataagtcttatttgtgaaaacaataacctcaaggtatatggggacctatttcccatatacctttcttactgaggaatataaaaaagtaaaaaccatggaggtgttcccccttgctaaaatatatcggaagacgcttagtctatatgattatcacactatttgtgattgtaactgtgacattcttcttaatgcaagcagcaccgggcgggccattttcaggtgagaaaaagcttccgcctgaaattgaagcaaacttaaatacgcactatggcttggacaagccgctgtttgtacaatatgtcagttatttgaaatcagttgcaatgtgggatttcggaccgtcatttaaatataaaggtcagagtgttaacgacctgatcagttcaggtttccccgtttcatttactcttggagcagaagctattctcctcgctttagcattaggtgtattgtttggagtcattgcagctctttaccataataagtggcaggattataccgtcgcgattttaacgatatttggtatttcggttccgagctttatcatggcggctgttctgcaatatgtgttctccatgaagcttgggctgtttccggtcgcggggtgggattcctgggcatacacctttttgccttcaatcgcacttgcttccatgccgatggcgtttattgccagactttcccgttcaagcatgatcgaagtgttaaacagtgattatatccgcacagcgaaagcgaaagggctgtcccgcccagcggttacagtgcggcacgccattcgaaacgcgcttttgccggttgttacatatatgggcccgatggccgcacaggtcttaacggggagcttcattattgaaaccatttttggtatccccgggcttggtgcacacttcgtcaacagtattacaaaccgtgattatacggtcattatgggtgtaacggtgttcttcagtgtcatcctgctattgtgtgtattaattgtagatgtgttatacggcattattgatccaagaatcaagctttccaaagcaaagaaaggagcctaggccatgcagaacattccaaaaaacatgtttgaaccagccgcagcgaatgccggcgatgcagaaaaaataagtaaaaagagcctttccctctggaaagatgcgatgcttcgcttccgcagcaataagcttgcaatggtcgggcttatcattatcgtacttattatccttatggcaatttttgcgccgatgttctcaaggtatgattattcaactactaatctcttaaatgcggataagccgccttcaaaagatcactggttcggaacagatgatcttggacgggacattttcgtccgtacatgggtaggggcgcgtatctcaatctttatcggtgttgcagctgctgttctcgatttgctgatcggcgttatttgggggagcatttcaggcttccgcggaggcagaacggacgaaatcatgatgcgtatcgctgatatcctttgggcagttccttcattattaatggttatcttactgatggttgttcttccgaaaggtctatttacgattattattgccatgacgattacaggctggattaatatggccagaatcgtgcgcggacaagtgctgcagctgaagaatcaggagtatgtgcttgcttcacagacactgggtgcaaaaacatcccgtcttctgtttaaacatatcgtgccaaacgcaatgggttctattttggtcacgatgacactgacagttcctactgcaattttcacagaagcctttttaagttatttgggacttggtgttccggctccgctggcgagctggggaacgatggcttctgacggattgcctgcattgacctattatccgtggcgtttattcttccctgccggatttatctgcattacaatgtttggtttcaacgttgtcggcgacggattaagagacgcattggatcctaagttacgtaaataagggagtgatacgggtgacacgcctattagaagtaaaagatttagcaatttcatttaaaacatatggcggagaggtccaggcgatccgcggagtgaatttccatctggataaaggggagacgctggccattgttggagaatcaggttccggaaaaagtgtaacctctcaagcgattatgaagctgattccaatgcctccgggttatttcaaacgcggtgagatcctgtttgaaggaaaggatctggtgccgctgtccgaaaaagaaatgcaaaatgtccgaggaaaagagatcggcatgatatttcaggatccgatgacctccttaaatccaacgatgaaggtcggtaaacaaattacggaagtgctttttaaacacgaaaagatctcgaaggaagcggctaaaaaacgcgcggttgaactgctggaattagtcggtatcccaatgccggaaaagcgggtgaaccaatttccgcatgaattttcaggcgggatgagacagagggttgtcattgccatggcgcttgcagcgaatccgaaacttctgatcgccgatgagccgacaactgctcttgatgtaacgattcaagcgcaaattttggaattaatgaaggatttgcaaaagaaaattgacacgtccatcatctttatcacacacgatcttggtgttgtggctaacgttgctgaccgggtcgctgtcatgtacgcgggacagattgtagaaaccggtacggtagacgaaatcttctacgatccgagacatccgtacacttgggggcttcttgcatccatgccgacactggaaagttcaggagaggaagagctgactgcaattccgggcacgccgcctgatttgacaaacccgccaaaaggagatgcttttgccctgcggagctcttacgcgatgaaaatcgattttgaacaggagccgccaatgtttaaggtatccgatactcattatgtaaaatcgtggctgcttcatcctgacgcgccaaaggtagagccgcctgaagcggtaaaagcgaaaatgcgtaaactggcaaatacgtatgaaaaacctgtcttagtgagagaaggtgaatgaattgactgaaaaattattagaaatcaaacatttaaaacagcactttgtcacaccaaggggaacggtcaaggctgtagatgatttatcatttgatatctataaaggtgaaacattagggctggttggtgaatcaggctgcggtaaatcgacaacaggccgaagcattatccggctgtacgaagcaaccgatggtgaggtgctgttcaacggcgaaaatgtgcacgggagaaaatcgcggaaaaagctgctggaattcaaccgcaaaatgcagatgattttccaagacccatatgcatccctgaatccgagaatgacagttgctgatattattgctgaaggccttgatattcataagctggcgaaaacgaaaaaagagcggatgcagagggtccatgaactattggaaacagttggtttaaacaaggaacacgcgaaccgttatccgcatgaattttccggcggccagcgccaaagaatcgggattgccagagctcttgctgttgatccggaattcattatcgcggatgagccgatttccgctttggatgtatccattcaagcgcaggtcgtgaatttaatgaaagaactgcaaaaagaaaaagggctcacatatctgtttattgcccacgatttatcgatggtcaaatacatcagtgaccgcattggcgtcatgtatttcgggaaactggttgagcttgcgccggcagatgagctttatgaaaatccgcttcacccatatacaaaatcattgctttctgctattcctcttcctgatccggactatgagagaaatcgcgttcgccagaaatatgatccgtctgtccatcaattaaaggatggggaaacgatggaattccgtgaagtcaaaccgggacattttgtgatgtgcacggaagccgaatttaaagctttttcatgattcatcaatccttcaagagatttctcttgaagggtttttttgcgtcctcatagaaagtgagaatgataacatttacaattagaggaaaaaagcggaggcgaaatacgattcaatttctgcataacaaaaatgtttttgcgctattgctgtctcaatcttttcaatctttagcaggtgtcctcgtcacaatcgttttaatggtccgggtctatcaaatgactgactccgtttttttggcgggccttattttatcgttcatgtcgtttgcgagtatagcagcaagcttttgcgtctctccggtgcttcgcattctcggttttaaaaaggtgcttgcgggagcgaatctgctgagagcggtctttacaatcctgatggcatacagcgtcactcatcacggacaggcattcttttggattacgctgctgtttgtgttttgtttttccttcgcgggcgctttttttcagccggcaagatttgcgctgctgccgattattgttccaaagaagcaatatgtaaaagcgaatggtgtgatctccctctcgaatcaattgttcttaacagcaggctggggccttggaggccttctgacgtacgccgttccttttgaactcgttgtcggcgctgccatttgcctgtttgttctatcgggagcttccatcagtgtgttgcatgtaaatgaagaagaggctgcaggaactgctgaaacagcatctgtcagaagtatatggaaggatttaatgatcatccctattgtaagagacattactgtaatggacatgttagaagctttggcgggttccgtatggtcatctgctattctcctcgcatttactgcggctgttttgcatgaaacagaggtgtggtgggggatgtttaacgcttcctattttataggcgcaattgtcggcagtgtgattgctattcgtttttcttctttttttgagcggaatatgggctatgccattatgttcagctcgcttgtaatgtcggcgctgacccttttgttttcattttctccagtcccatttttatgcgctctggcttgtgctgcaatggggcctttttatcaggtgcgtgatatttgccaggaaaccatgctgcaggaggttattcccgagcagaaacgaatcggaatcatggctgcaaaaaatgcgattttgactccttggtcaggcgtcacctactccattatggggctagtggctgatgctgctggtgcgaaaatagcttttatcgcggctgctgcattatatatcatgacatttctgattgcactggcgcagccccgcctgattcattacaggcgggaaaaccgagttcaatgagatacacttcaaaatgaacggagcagctggctccgtttttgctgaaaaaaaatgaaaccatggcggaagttcgcacgtctttatagatgtaaggctgtttaaacaagaagaaatggggtatatctaaaagtatgaagacaacgaactcataaggagcaaatcaatgaactggtatgaaaagcttagcgagtactttccaattgaagaaatgaaatcaaaagcgcatatggaagctcttctgaaagagcgaagcgatatttatcataaagatgaaggcaaacatcatattttaatgtttgcggagttcgattcttttatcttcgttgattatctgtatgtgtctaaggatgcaagagggcaggggcttggcggcaaattgatcgcgaagctgaaaaagaaaaataagcccatattgctcgaggtggaacctgtggatgaagatgatactgatacagaaaaacgcctgaggttttatcaaagagagcatttcaagcatgctcagtcaattgggtaccggcgccggtcattggctacgaatgaagtaaacaagatggagattctgtactggtcaccaaaaacagaatcagaagaagaaattcttgaagccatgaaacagacatatgaaaacattcatacttataaagacgagaaatggtacggagaatcgtacgaaaaaacggatgaagtcctgaaactcattgatgaagaaaaacaaaaaaatattttcgatcagttaagctaattgagaattagaacatatcatgaacattaaaaatttgctggattgacacatttttttcttaggatactgttcacacttacttttttatagtataatacctgtaaagattccttttttagagtaatttcaatttaagaataaaatagatgttcatcctactaattagaggagtgaagatgaatggttacactatacacatcaccaagctgtacttcatgcagaaaggcgagagcgtggctcgaggagcacgatattccatttgtagaaagaaacattttctctgaacctttatcaattgatgaaataaaacaaattcttcgaatgactgaggatggaacagatgaaatcatctcaacccgttcaaaagtattccaaaaactgaatgtgaacgttgaatctatgccgctgcaagatttgtaccgcttgatcaacgagcatccagggttgcttcgccgtccgatcatcattgacgaaaaacgtttgcaggtcggatataacgaagacgaaatcagacgtttcctgccaagaaaagttcgctctttccaattaagagaagcacagcgtttggcaaactaatagatcgtatcatcaaaagaaggctgagtcatcagccttcttttatttttcaacctgctggtaataaatgctcgcaagaatgacaaacgcaaccgtcaaaatggggaggagcgtttcaactgtgccgtgctgcgccataaaaagagacagctttttgtctctgacaatcatttctccgccagtataagcaagcagcccgcttcccgcgtaaatcagaagcggtattttctctagtgcaatatggatgagtttgctgccccaaataataaccggaaccgatacacacaaacctataacaacgagagaaaactcaccgtgtgatgctcccgcaactgcgatgacgttgtccagcgacataaagagatctgcaagcacaatcgttcgtatcgctctccacagggaggtgctgcttttaatgtgcttcgtgtcttttttttcaatcagcagctgatatcctaaatacagcaggaaaattccgccggcgcactgcaagaacggaatgttcaaaagatatacagctgcacttgttaatccgattctcatggcaacggcaataaatgttccgagaataatggcttgctgtctttgcttgtccggcaaatgtctgctggccatggcaataacaaccgcgttgtctccgccgaggatcaggtcaatcccaacaatgacaagcagagaaatcagatagtcatgctccatgaagcggcacctcgctttcagtccttcgcttgtactactactatatgagacaggttgtattttatgatatcagccgcctgaactgccgttttttaggaaaaggtgcatttttatttcttttgtgactgttttatcataaaatagaaatacaaaggaattcacactggccttggttaaggttaagatgtggacggaatgggtaaagtgtagtaaagtacaattaatcgggagcttagatgtcccttcaacatcttatatagaagggaaggttggcaaatggaaattgaaagaattaacgagcatacagtaaaattttatatgtcttacggagatattgaagatcgcggttttgacagagaagaaatttggtataaccgtgagcgcagtgaagaacttttctgggaagtcatggatgaagttcatgaagaagaggaattcgctgtggaaggcccactttggattcaagttcaggcactggacaaaggattagaaatcatcgtcacaaaagcccagctttccaaagacggacaaaagctcgaactgccgattcctgaggataaaaagcaagaaccagcatctgaggatcttgacgccttgctggatgatttccagaaagaagagcaagccgtcaatcaggaagagaaggagcaaaagcttcaatttgtcttgcgatttggcgattttgaggatgttatttctctatctaatttgaacgttaacggaagcaaaacgactttatattcgtttgagaaccgatattatttatatgtagatttttgcaatatgactgatgaagaggttgaaaatcagctaagcatcctgctggagtacgcaaatgaatcctcaatcagcatacaccgtcttgaagagtacggcaagctgattatttcagagcatgctctagaaacgataaaaaaacactttgcatcatagcaaaccgatttccttccggaaatcggttttttttatgcacgaaaatgccattttagagatgtgaaaaatcaaaaacatatagacaagcggaaaatacagcgaacaggagttgatcatcttttccagaaagtatacttcatctggaaaggagagatgacaattgtttagtgctgtgactgaagacggccaaatgtttcaccttctaggcgctcagcaaaaccagaaattaaagcggagacggttcttctgtccggtatgcgggggagagctagctgtgaagctcggacttcaaaaagcgccgcattttgcccataaacagaacaagtcctgctccatagatatcgaaccggaaagcgcctaccacttagaaggaaaaagacagttgtatgtatggctgaaaacgcaacgggcttcaccaatattggagccgtatataaagacaatcaaccaaagaccagacgtcatggcaaggatcaaggagcatatgcttgctgttgaatatcaatgcgccactatcgctccagatgtctttcaaaagcggacagagggcttcaaacaagaaggaatcatcccgcagtggattatgggatacagccgcttaaaacggactgcttcgtccttttatcagctttcagcttttcattggcagtttatcaatgcaagtccatacagagaactgatatgttattgtcctgaaaggcgttcttttctccgactcagccacatcattccattctacacaaaccattcttattcctcagtccaaacgatccctatccatcgggcaggtgcagacgatctttttttcactgaaccgaaaccctcaattcaatattcaggctggacgaaagcgattcaccgttttcgccataaaccccatcggtttaactctaaggaaacaaatcgccttaggcagatgttttatgagaagcggcagacatctttttcttttctgccgactgaagtgtttgttcctgttagaaaaggggcagtttttaagagtccggtttttgtgtggcaggggtttctttatttgtttatgacggatcttggagataaacgtgcgccaattcgtttttcagctgttttgcagcagtgcaaactgcacattcataaaaagaacattgcactcaggttcgaatgcagcgaagagtgtctttcagaagcggttaaacagtatattgattttttgtgcaagaagggatttttaagggagactcagaaagaagtatatgtgctgaatcggcctgcaggcggcatacattcaatgcaggatctcatagaaagagaccgcagctgttttatagaatgagtttgtctgatttggctcaccctaagacaaaggtggtgggcaggctgtgaaaggcacaaaaggaaaggtttttcgtgtttttactgcttttttggcattcgttctcttcattactgcatatgatttgacaaaaggcagtgaaaaaccggaagatattcacaacacaagtttattgagaaacagctgttttttcaattggcttgaatcaaagaagacgagggggatcaccatggctgaggaaaaaaaagcaaaccaactgcctgacagaagtgaggtaaaggcagaagacacatggagacttgaggatatttttcctagtgatgaggcctggaataaagaatttcaagctgtaaaagaattaattccgaatttatctaagtataaaggaaagctggcagattcagctgatcatttatacgaggctcttacgtatcaagataaagtgatggagcggctgggtaggctgtacacatatgcgcatatgcgctctgaccaggatactgggaactccttttaccaggggctgaatgacaaggcgggaaacctgtatacacaggccgcaagcgcgacagcttatttggttccggagattttatccatagaagaagacaaactgcagcagttcattcttgaaaaagaagaattgaagctgtactctcatgcgattgaggagattacaaaggaacgtccgcatgtgctgagcgagaaggaagaggcactgcttgctgaagcctccgaggtactggggtcatcttcaaatacattcagcgtgttaaataacgcagatataacgtttccgtccattaaagacgaagatgggaatgaaaaacagatcactcacggcaactttattaatttcttggaaagtgaaaaccgtgaagttcgcaaaaatgcgtttgacgcagtgtataaaacgtacggacaatataaaaacacaatggccacgacgctaagcggcactgtgaaaaaggacaacttctacgcgagagtgaaaaagtacaagtcagcgcgtgaggctgcgctttctaacaacagtattcctgaggaagtatacgataaccttgttaagacgattaataagcatttgccgctcctgcaccgctatattgcgctaagaaagaaagtgcttgagcttgatgaagtgcatatctatgacctgtatacaccgcttgtgaaagatgcggggatgaaggtgacatacgaggaagccaaagattacatgctgaaaggcctcgcacctttaggggaagaatatgcctctatcctaaaagaaggactggaaaaccgctgggtggacgtttacgaaaataaaggcaaacgcaatggggcttattcatcaggagcttacggcacgaatccgtatattttgatgaactggcataataacgtcaataatctctttacgctcgtgcacgagtttggacattccgtacacagctactatacgagaaagcaccagccttatccatatggcaattacagtatctttgtcgcggaagttgcctctacgacaaatgaagcgctccttggcgaatatttgctgaacaatttagaggatgaaaaacagcgcttatatattctcaaccatatgcttgagggcttcaggggaacggtcttcagacaaacgatgttcgctgaatttgaacatctgatccatacaaaggcgcaagaaggcgagccgcttacacctgagcttctgacaaatgtctattacgacctgaataaaaagtattttggagacggcatggtgattgataaggaaatcggccttgaatggtcgcgtattccgcacttctattacaattactatgtgtatcagtatgcgacagggtacagcgctgcccaagcattaagcagccagattttgaaggaaggaaagccggcggttgaccgttatattgacttcctgaaagcgggaagttcacaatacccgattgatgtcttgaaaaaagcgggtgttgatatgacgtctccagagccaatcgaagccgcgtgcaaaatgtttgaagaaaaacttgatgaaatggaagagctgctgatgaaagtcaagcagtcttaaaaagtaagcctgtgcggaaatgacgcacaggcttttttaaaaccctttaaaggttttccggtgattcaagcggtagagggtaaacaaaatagacagaaacagcagaggagaggtaatataaagcggcagcatatgcatcatgcctaagatattcagacagaaaaaaacggcaatgcacacaattgagatcaaagtagacatcatggcgatcctcctcgtcctttttccttataaggatatgagtgaatgcacttcgttatgttttgtgacaaaaatatgaacattaagcatagaggttgtcaaaagtcgacatcttttgttatcataaggatgtgaaattgatcacaaacaaacattacccctttgtttgaccgtgaaaaatttctcccatcccctttgttgtcgttaagacatatgaaaccgcgcttatcccggcgcggtttctttagtgctaaaaacagaacgtacgtttggttatggcgtaaaaaaacagcctcaagcatatgcacgcctgcggctatttttcacatgattgatattcatcagaataagtgctgagagacttccaaaacattccgtgtttggcttccactttggcaacctttttagcaaacgccagttttttcatttctttttctacctcttcaaggctcaggtcatatacaagagcaatttccttcgaggcaacgaagcggaaatattcaataaaacattctaaaggcggtgtttccgacggcttcggctcgtcgccaagcatctcaaataaaatttcttcatatacatcatatgagtagctgccaggaactttaagcccttcatcctcatgctgcgtattaaaaaacgtcagtgtcggattaacagaaacatccatctcagcagcaattttcatgtcacattgaagcgccttgaccgcgctttgagaatgcagatcttttttgaattcttcaagatcgagacttgtattttcagcaatctccaaaagcacgttttcatccgtaatatttttctttgaaacaaataggctctcctgcatatttctgagaaattgcatgccggcttttcgtccttgcaattcggctgctttaaaagcgagagcagccatataaggcgatgaaagcggctgatcctgttcgaaccagacattgccgtcacatgacatgccagagcggctcgcgatcttttcccatgcttctgcgagaagatgcttttttcgctttttatttaaagcggtaaggcttgcggaagcgataatgcgtaaggtgaaaaaacgtccgtatctgattttcagctttttgatgacgggctctaaggaccagcattcaggacataaagggtctacaaacatataaatttcaagcggtttttttggatgaccgtggcaatgggcgaagtatagctcatgctgatagtttgtcaagatgatcgatcctccgcttccgtttgattcaccatatgccttgctgtcaactccagccggccaaacaaaaactcacgaatttcgccctccagccctacatggtacattgcgtccttcatacagctgagccacgcatcagctctctcgtttgtaattggaaagggaagatgccttgctctgagcataggatggccgtgctcctcagtataaagcggaggcccgcctaaatactgagttaagaattgcttctgtttcctggcggtttctgtcaaatcgcttggaaaaatcggcttcagcaaaggatgagacgcgacacgctcataaaaagtatcaacaagttgcgatagaagttcctctccaatcgcttcataaggtgcgttaaacgattgtcccatgttgactactcctttaaatatggctaataggaatcataaatcctattgcaaaaagtaattttctgtatttcattgtttcatctagatttattttagcaacaaggcatcatttctacaaacaaactgccttttatgcgtttgatgacttatttcggctgacagccggggtttgtatttcatatcatatcacataaaaatcaggaatgcgtaagatttcacttcgcaaaaaaaccagagggaaagagcacctctggttacgcgtaataagctgaagttattttttttacatagttttgcgtttcttggaaaggaggaatgcctccgtatcggtcaacattccccggtccggcgttgtaagccgctaatgccatagacacattgccgtcgtatttatccagcatttgttttaaatatttcgttccgccctccacattttgctgcggatcaagcggattggaaacgccaagtgagcttgctgttgacggcatcagctgcatgaggcccatcgcacctactccgctgaccgcttttgcattaaagcctgattcctgtttgatgacggcgcggatcagtttttcatcaacgccatatttatcagcggcttttttaatcgcactgtcaatagaaaagtctcccgaactgatctgatttgctccatgtttgtttgaagctgaatctgcagcagctgtttcagtgctttctgccgcttttgtgattgaacctgaattgctgctcgtatatgagttaagcccatacgctgaaagcagtgacggcgctgttgtattcccgctgttcagcatgttgagcgggcttggcgatgaagaaggtgctgattgctgagatgccagaccgtttgtatattggctgagcaaagagctaaaacttgaaagcgggctttccgtattctgagtgtccgagctgctgcgtgcattagatatggactgtagtgcctgaagctgaagtaaagctgcccaattcgttacattcacgatgtcattccaccttatatagactttcgtttttcttcataaaaacgcagaattttatttttggtttcgcgctgaggaatgctgaattgctgaagcagcttctcgaaagcttttctgccctcatgccaatccgccgcctcaaattcaatttcatagtcctctttatttaaatatcggctgtggtctaaaactattaagcctttttctgtttctttttccgcacggtttgttgctaaagatccaaagtattgaatggcatccgtatcgatctgaagcttgtgcagctggtccttcacagggccctcgggaactgaaaatccagcgagatctgatacctctgaaagctgctggtgcgtttccagaagccccacatcagccggctcctttaatgtaaggacatactttccgttttttctgcggatacgaagcgcagcttgtttttgtttcagcgcgaagctgtctgtatcaaaataatgattcttttgatctgtaaaatctttttctgtcagctggagtgccgctgctatgtttttgaattcttgtttggtcagcatgtttttaaattcgatttcaatttcttggctcatgatgctcttcctttcctccctgtaaatcttatttttactattatctctttagatgttaggtttatcaatatcgagctcgatatgataaaatgaatctgtactttgtttaaaaaaggagagcattatgcaaaacagaatcgaaattttgaatgcaacattatcggatgatcagcttcgccttgcctgtcagacagaaggaaacgaagcggaacgcaagccgtcaggtcaaatgcttgttgattctgaccactttgcttttgtatacatacttgaattagctgattcttttgaatatgtcattataaaggaacatgtatggccggaactgaagcaggcccatgcacaaaaaataccggttgttttagaggcaggagaccaaacaattgaactggcaggcctgcatgaggagctggaatatcttttagaaaatataaaagataatgcaaactatggagaagaaatggaagaaaaagtgaaacgcgtgtttttatagaaactggttcggaattgggggatgtatgatggatgacaaacaatgggagcgttttttagtgccgtaccgccaggctgtcgaagagttgaaagtgaagctcaaggggatccgcacactatatgaatacgaggacgaccattcaccgatcgaatttgtgaccggacgcgtcaagcctgtggcgagcatacttgaaaaagcgagacggaaaagcataccgctgcatgaaattgaaaccatgcaggacattgctggccttagaatcatgtgccaatttgtcgatgacatccaaatcgtaaaagagatgctttttgccagaaaagatttcaccgttgtggatcagagggattatattgcggaacataaagagagcggataccgatcataccatcttgttgtgctgtaccctttgcagacggtatccggagaaaagcatgttctcgtagaaatacagatccgtacactggcgatgaatttttgggcgaccattgagcattcattgaattataaatacagcggaaacattcctgaaaaagtaaaactaaggcttcagcgcgcttctgaagcggcttcccggcttgatgaagagatgtcggagatcaggggtgaagtacaggaagctcaagctgccttttcaagaaagaaaaaaggaagcgagcaacaataggtaaaggggaagaagagcatgaaatttgccgtatcatcaaaaggagatcaagtttctgatacgctgaaaagcaaaatacaggcgtatttattggattttgatatggaactggatgaaaatgaaccggaaatcgttatttcagtcggaggcgacggaacgcttttgtatgcttttcacagatacagcgaccgcttggacaaaacagcatttgtcggcgttcacacaggtcatctgggtttttatgccgactgggttcctcatgaaattgaaaaacttgttcttgccatcgcgaaaacgccgtatcatacagtcgaatatccgcttctcgaagtcattgtgacctatcacgaaaacgagcgggaagaaagatacttagctttgaatgaatgtacgattaaaagcatcgaaggaagccttgttgctgatgtggaaatcaaagggcagctctttgaaaccttccgaggcgacggcctctgcctgtcaactccatcaggcagcacagcctacaataaggcgctgggcggagcgattatccatccgtctatcagggcgatccagcttgcggaaatggcttctattaataaccgcgtgttccgtacggtcgggtcacctctgcttctcccatcccatcatgattgcatgattaagccgagaaacgaagttgactttcaagtgacgattgaccatttaacccttctccataaggatgtaaagtcgatccgctgccaagttgcatccgaaaaagtgcggtttgcgagattccgtccgtttccattttggaaaagagtccaggattcgtttattggaaaaggtgaatagaaagaggacatatcgtggagcatttttttatcagaaagaacattacttccgctgaggacgggatgactgtaaaagaatatgccagtgaactgggaatttcgaaacgtctgctgaccgatattaagtttggcgggggagacctgcagattaacggtgagcatgtgacggtcaaatacgttttgaaagatggagatcttcttatcgtgaagtttcctgaggagcaggtgagcgagacgctgttggcagagcctgttccgctcgatatcctttatgaggatgaacatgtgcttgtgataaacaagcagccgtatgtgtcatcaatcccttcgagagagcacccctccggcagcattgccaatggaattattgatcattatcaaacaaccggagtgagggcgacagttcatcttgtcacccggttagaccgggatacatcaggtgtcatgcttgttgccaagcatcgatttgcccactccattttatcgtctgcgcaaaaaaacggccttgtgaaacgccggtatgcggcagtggttcacgggcggatggcacagatggagggaacagtcgatgctccgattggcagacatcctgacagtattattgaacggacggtaacgccagacggccagaaggctgttactcatttttacgtcacatgtgcaaatgacgacatgacctcggtggcattgcagcttgagactggacgaacccatcaaattcgtgttcatatgagttatctcgggcacccgttgtgcggcgatacactgtacggcggaacgagacaggaaattgaccggcaggctctgcacagcgagcatctttcgtttatccatccgctgacacaggagaacatgacgtttcatgctccactgcctcaggatatgagaaaactgataaaaggagagaatcattgattctctccttttttatatggggcgaaatcttgattcgtcgtaaggcagggagcttggaacagagacggtttctatttctggaaagcgaaagcctgtcagttgatttccgaacacgcagcctgtatcaatgttgatggtgcgattgaccttccgaggctctttcacaggtgtatgaccgtataccacccaagcctttccgttataggctgccgcccaatcacgtctgacgggtctgccgtccggatatgtttcacccgtcacgtcaccgtaaagcacaaagtccttcactctgcgggtatatttgccgatatcgtcagctcttatgccagcatgggcgacaactaattctccattatgtaagatgtcgtaaagcggcgctgtttcgtacagcttcataaactgttcgctgactgattttttctcatctttggaaagttcctcaagctctgccgctgttgtttcgagaccatgcatcacttttaccggatttccttttaagtaacgatataatttattgcaatggtttcccgggacataacgcacagcgcctttttcgtaagcgccggctacaaatcggatgacctctatcgatttgggccctctgtcagttaaatctccggcaaaaacaagcaccctgccttcttcatggacaggtactccatttttgattgtatagccaagcttttggattaatgcagtcatttcgtcatagcagccatgaatatcgctgatgatatcgtaagccatgcggtctcctccttaccgattgttttatttattatgaagcaaagtgttgtgagtcatcacaagcttttatgtgcaaattatagaagaagaatcattttctaaacaggattaagaccttatcactttatttttcatcatcacccttgttaaaatcgcgttatgttttttaaaaatgaggttttgttctctgagtgagaactagcataaccctgacttaaaaaggaggttctgattatggcgcatacatctgtcgcatctttagttgttgtacttatcgttgcatttttgacacccatccttttgcatcggtttaaactcagcatcccggttgttgttgctgaaatcattatggggctgataattgggaaaagcggccttaatttagttgtggagggtgacacctggctccagacactctctatgctcggatttatctttttaatgtttttaagcgggcttgaaattgatttttcgtcgtttgagaaaggaaagaaaaagcagttcctgccgaatggcaaggaagcgccgaatacgtttgctgcggcatctgttattttcgtcggtatttttattttatcattgctcttgtcctatgggttcgtcttggccggatttatccaaaatgcatttttgatgaccctgattatttcaacgatttcattaggcgttgtcgttccaacattaaaagaagaacggatcatgaattcgaatatcgggcagattattttgcttgttgctgttattgctgatttggccacgatgattcttcttgctgttttttcttctttatacggagaggacagcggaaacatgtggctcctgatgattctgtttgcggccggagtggtgctttactttttcggccgggtcttcaaacatcgctcttttgttcaatccatgtcaaaagggacgatccagatcgggacgcgtgccatttttacgttaatcattgtactcgttgccctgtctgaatcacttggggcggaaaatattctcggcgctttcttagcgggggttcttgtttccctgctttcgccaaacaaagaacttgttcagcagctggattcattcggttatgggttcttaataccgattttcttcgtgatggtcggtgtgaagcttgatatttggactcttttccaggataaaacaattttaatcatgattccgctcctgctgctggcgctgttagtcagcaaaatcattcctgtcatgtacttaaagaagtggtatgataaccgaaccattttcgcgtctggtttcctgctgacatcaacgctttcgctcgtgattgccgctgcaacaatcggccagcagcttcacgtgatcagtgcaaatatgtcaggagcgctaattttagtagccgtcattgcaagtatttttacgccgatctgttttaaaaaattatacaaacgggaagagcagccggaggagaaaaagacgattacgttcattggcgccaatcaaatgactttgcctgtcacactcgaattgccagaggaagagtatgacgtgcgtgttgtacacgtctaccaagagaatgcggaggaaaagctgtcagaatcagtgtttgctgttgaaacaatttctgactatgaacacgagacgcttgaatcactcggcatttttgaaacggatatcctcgttgtggcgacaggaaatgaagatatgaatgcagacattgcattacttgcaaaagaaaaaggcacagaaagagtcattgcaagcgtaggatcaccggagcatgaagcagctctgaaggagcagggaatcagcatcttttctattctgctgtcgacaaaaacgctgcttcgcgcactgattgaagcgcctggcgtcatgaagctgctcacgaaccaagagtcttcgctgtatcaaattaatatggagaacagtaaatatgatggtgtcattttacgggaattccctttaacaggtgacgtcatctttgtcaggatcttcagaggtgtggacagcatcgttcctcatggggatacaaggctgaaacttggagaccgtttaattgtcaccggatctcgggggtacgtaacggatcttaagaaaacattggaaggataaatcttgaccaaataaggattcgtgttaatatagaggtgcagaacaattcaatatgtattcgtttaaccactaggggtgtccttcataagggctgagataaaagtgtgacttttagaccctcataacttgaacaggttcagacctgcgtagggaagtggagcggtatttgtgttattttactatgccaattccaaaccacttttccttgcgggaaagtggtttttttattttcagagggggaatgatttgtgaagttttcagaagaatgccgcagtgcagccgcagaatggtgggaggggagctttgtccatccgttcgttcaaggaatcggtgacggaactcttccgattgaccgttttaaatactacgtacttcaggattcctattatttaacgcattttgcaaaggtgcagtcatttggcgccgcttatgcgaaggatctttatacaacggggcggatggcaagtcatgcccaaggtacatatgaggcggaaatggcgcttcatcgcgagtttgccgagctgttggaaatcagcgaggaagagcgtaaggcgtttaagccgtctcctacggcgtactcttatacatcccatatgtaccgttcggttttgagcgggaatttcgcagaaatcttagcggccttgctgccatgctattggctctattacgaggttggtgagaaattgctgcattgtgatccggggcatccaatttatcagaagtggattggcacatatggcggtgattggtttagacaacaggtcgaggagcaaatcaaccgctttgatgagctggcggaaaacagcacggaggaagtgcgtgccaagatgaaagagaattttgtcatctccagctactatgaatatcaattttggggaatggcctatcgaaaagaaggctggtctgacagcggcataaaagaggtggaggaatgtggagcttcacgccataacggatgacagcaagccggtagaagagctagcgagaatcatcattacgattcagaatgaagttgattttattcatattcgggaacgttcaaaatcggcggcagatattttgaaactgctcgagcttatttttgaaggcggtatagataaacgaaaactggtgatgaacgggcgcgtggatattgcgcttttctctactattcaccgcgtgcagctgccaagcggcagcttttcaccgaagcaggtcagggccagatttccacaccttcatatcgggaggtcggtgcattcactggaggaagcggttcaagcagaaaaggaagacgcggactacgtgctgttcggccatgtgtttgaaacggattgcaaaaagggtcttgaaggcagaggagtatctttgctgtcagatatcaaacagcggatttccatcccggttatagccatcggggggatgacgccggacaggttaagcgacgtaaaacaagcaggggcagacggcatcgctgttatgtcaggaattttctcttccgctgagcccttggaagcagccagacgatattcccgcaagctaaaggagatgcgctatgaaaaggcattatgaagcagtggtgattggaggcggaattatcggttccgcgattgcttattatttggcaaaggaaaacaaaagcaccgcattgtttgaaagcggaacaatgggcggcagaacgacaagtgccgctgccggaatgctgggcgcccatgccgaatgcgaggaacgtgacgcgttttttgatttcgccatgcacagccagcgtctgtacaaaggtcttggagaagagctttatgcattatccggtgtggatatcaggcagcataacggcggtatgtttaagcttgcattttctgaagaagatgtgctgcagctgagacagatggacgatttggactctgtcagctggtattcaaaagaagaggtgttagaaaaagagccgtatgcgtctggtgacatctttggtgcatcttttattcaggatgatgtgcatgtggagccttattttgtttgcaaggcatatgtgaaagcagcaaaaatgcttggggcggagatttttgagcatacgcccgtcctgcatgtcgaacgtgacggtgaagccctgttcatcaagacccctagcgaagacgtatgggctaatcatgttgtcgttgccagcggggtgtggagcgggatgttttttaaacagctcggactgaacaatgcttttctccctgtaaaaggggagtgcctgtccgtttggaatgatgatatcccgctgacaaaaacgctttaccatgatcactgctatatcgtaccgagaaaaagcggcaaactggttgtcggcgcgacaatgaagccgggggactggagtgaaacaccggatcttggcggattggaatcggttatgaaaaaagcaaaaacgatgctgccggctatacagaatatgaaggtggatcgtttttgggcgggactccggccgggaacaaaggatggaaaaccgtacatcggcagacatcctgaggacagccgtattttatttgcggcgggccatttcagaaacgggatcctgcttgctcccgcaacgggcgctttgatcagtgatctcatcatgaataaagaggtcaaccaagactggctgcacgcattccgaattgatcgcaaggaggcggttcagatatgatgctacagctgaacggtaaagacgtgaagtgggaaaaagacacaggtacaattcaagacctgctggcgtcttatcagcttgaaaataaaattgttatcgtggaaagaaataaagaaataatcgggaaagaacgctatcacgaggttgagctttgtgatcgtgatgtcattgaaattgtccattttgtaggaggcggatgagcatgttaacaattggcggaaaatcatttcaatcaagattgctgctgggcacggggaaatacccatcgtttgacattcaaaaggaagcagtagctgtttccgagtctgatattttaacctttgctgtgcggagaatgaacatctttgaagcatctcagccgaattttctggaacagcttgatttatccaaatatacgcttttgccgaatacagcgggcgccagcagtgctgaagaagcggttcggattgcaaggctggcaaaagcgtcaggcctttgtgacatgattaaagttgaagtcatcggatgcagccgttccttgctgcctgaccctgttgagacattaaaagcgtctgaacagcttcttgaagaaggctttattgtgctcccgtacacgtcggatgacgttgtgctggcgagaaagctggaagagctcggcgttcatgccatcatgccgggtgcatctccgattggatcgggacaaggaatcttaaatcctttgaatctgtcatttattattgaacaggcgaaagtgccggtcatcgtggatgcgggaatcggctcgcctaaagatgcggcatacgcaatggagcttggagcggatggcgtactgctcaatacggctgtatcgggcgctgacgatcctgtgaaaatggctcgtgccatgaagctcgcggtggaagcaggacgcctttcttatgaggcgggccgaatcccgcttaagcaatacggaacggcaagcagtccgggagaaggtcttcctgtatgacaggcaggtattcaaggcaggagctgtttgctccgatcggcccatccggccagaaaaaattgaaagaagcgcgcgccgtgattatcggcgccggcgcgctcggaacagccagtgcagaaatgctggtgagagcgggagtcggctctgtgaaaattgccgacagagattatgttgaatggagcaacctccagcgccagcagctttatacagaagatgatgtcaaaaaagaaatgccgaaagcagccgctgcggagcgccgtctccgttcgattaacagcgatgttgatgtgaccggccttgtcatggatgtgacagcagaaaatatcttcgagctgattagggatgcatcaattatagtggatgcggctgataattttgaaacccgcctgatcgtaaatgatgctgcggtaaaggaagggattccttttctttacggtgcctgtgtagggagctacggcctcacctttaccgtggtgccgggttctactccttgcctgcattgcttactcgatgcacttccgattggcggagcaacatgtgacacagccggcatcatcagtccggctgttttgcaggtagcagtctttcaggtaacagatgcactgaagctgctgacgggagaggagtgcgagccggtgctgcgctcctttgatttgtggaaaaatgagcggtcagaagtgagagcggccagtctcaaacatgacgcatgcccaagctgcggcacaaaggattttccgtttttgtcatatgaaaatcaaacaaaagcggctgtattgtgcggcaggaacacggtgcagatcagatcatctattacgaaagaagcggatcttgaagcgcttgccggtcagctgaggcaggccgggcttgaagtagctgcgaacccgtatttaatttcctgccgctcggatgatatgaaaatggtgctgttccgggacggcagagctttgatccatggaacaaatgatattgcccgggcaaaatccatttatcataaatggatcgggtaataaaaggagtgtagtgtaatgagtatatataaagcattgacaatcgccggatcagattcaggcggcggcgcagggatacaggctgatattaaaacctttcaagagcttgaggtattcggaatgtctgcgattacagcggtaaccgctcaaaatacgcttggcgttcatggggtgcatccgctgactgtagaggcgttgagacagcaaattgacgctgttgctgaggatttgagaccggatgcagtcaaaacgggaatgctctggaatgccgacatgattgaagaagtggcaagaaaaattgacgagtacggattcaatcgtgtaattgttgatccggttatgatcgcaaagggcggggcatccttgctgcgtgatgagtcagttgccaccttaaaggagttgctcattccaagaagctacgcgattacgccgaatgtcccggaagcagaaacgctgacaggaatgacaatcagctcgctggatgaccggaaaaaagcagcggagcagctcgtcaagatgggtgcgcagcatgtcattatcaaaggcgggcaccagcctgaggacaatcacattactgaccttctttttgatggcagcatgtttatgcaaatcacccatccttatatcaatacgaagcatacgcatggcacaggctgcacctttgctgcagctttaacggcccaaacggctaaaggagacagcatccatcaggcatttgaagttgcggccaactttgtccgtgaagcggtggaaaatacgctcggcatcggatcgggacacgggccgacaaaccatttcgcttttaaacgaaacagcttaaatacaagccgatgagatcaccagctgatggtgatctcttttgcgtttgctacggtatgcgcttttcatctggacaaggttatgatatgataggaattaagatcaggtactaatactatgtctttattaaatataggaggctttatacatatgaatttttcacttgaaggccgcaacattgttgtgatgggggtagccaataaacgcagcatcgcctggggcattgcgcgttctttacatgaagcgggtgcacgtttgattttcacatacgctggtgaacgcctggagaaatccgttcacgagcttgctggaacattagaccgcaacgattccatcatcctcccttgcgatgttacaaacgacgcagaaatcgaaacttgcttcgcaagcattaaggagcaggtcggtgtaatccacggtatcgcgcattgtatcgcgtttgccaacaaggaagagcttgtcggcgaatacttaaacacaaatcgtgacggcttccttttggctcataacatcagctcatattctctgactgctgttgtcaaagcggcacgtccgatgatgactgaaggcggaagcattgtcactttgacgtaccttggcggagagcttgtgatgccaaactacaacgttatgggtgtagcaaaagcttctcttgatgcaagtgtgaaatatttagctgctgacttaggaaaagaaaatatccgcgtcaacagcatttctgccggcccgatcagaacattatctgctaaaggcatcagcgatttcaactctatcttaaaagacatcgaagagcgtgcaccgcttcgccgcacgacaacacctgaagaagtgggcgatacagctgcgttcttgttcagcgatatgtcccgcgggattacaggtgaaaatcttcacgttgattcaggtttccatatcactgcccgctaagcaggatctatttcaagcaatcccgaatagggattgcttttttatttcttctgattttcagctttctgtcatatagatagaatatgacacaatcggagggatgaagatgtctaataagaaaagaaacgcggataaaaaaccgctcatgtatattgttcagccggattatgcagaaactacaagatcatccatgcaggagattgtcatcaaaagaaaggccgacaaacccgctccgccaaaagctgaggaaaagccggtttaccatgagaagcagcaggaggaagctgtggcacaggatgtcctgcaagaagaccaaaagcctgcagccgaaccagtgagtcagcaaactcaagaggtgagagaaccagagaacataaaaagccaagaggaacagaaagcagagccgcaggccgtagaagaaaccgttgaacacgagcccccgaaagcagaaaaaaaggaagagcctgcacttgaggcccggaagcctgagaaagaaccggaagctgtccatagtgctgataaagcggaggaaaaagcaccgccggcacgaaaagtgaaaaaaccgatgagcaagatgacgatccacgaaaaaattgattttttaacaaagctgcctcataacatgccgagagcgctttgtttgattgaagccaatggaagaacgtacaggggcgtgattgtcggaagaagaaatgattccgtcctgcttcgaacaaccggaaacggagccccaaccgaactggcaatcgatgatattacctctttgcacccgctcggtttttaacgaaaaagaaaaaagctgcccggctgatgttgccggacagcttttttacatagagaaaagcctgcggcttgcaagcttttccagcttatgattaatgctgatgatgtgtacgattgattaatcgaggatttaagcagttgattgcgcagaagcagtctaagtcaacttcaatacagtagttcgttttttcgagtcggaacacttcacacaccgtatctttatcggtgaagtccaaaatgtgtttgtgttcgtcaaatgcgattaataatgacagtgttgcgcagcttccatgcactctttcgaccctgaaaaatactgtattaaagcaagggccgttatcgagttcgccgacatttccgaaggcgactaatggcgttgattttgatgtaaatattgcaaaaggcactgtgtcgcctaacgaatggcttacagataaaagcttagagtggcagccggtcgggcagtcttcttcaacagcgttttgcagatcttcaatattttctacagcttcacgcacgcagcttgatgttttctggctcatattatccctcctgccttataaatttgagactggcgaaatgatggagagtcagctgcctcacgcaggaagcagctgaatgatttgcacctgtaatagagtttggaaggggattcctctttacaagtgtttatccattgtgatgatgctttttatctttatgaggcgatgttctgtcaactagctctggtgacaggcactgaatcgcgcagaagcatccgagatccacttcaatgcagaaatctgttttttctagcccgaagaaatccgggtcgcaaggatggcaaacacttaaggtatcgcctttaacatcgacagggcgtaaaatagacagtgttgcgcagcaatcacataatttttcaacgcggaagaaaatggattcaaagcattgcatatcatccacaaatccccccacgtttccgaatgtggagaacaatccgccttttttatcaaacaagagaaacggaattgtgtctttacctgcaattgtcggattcaaaaggtttgtatagcagccagtcggacactgttcctcaactgcctcctgctctgctaaaatcttttccactgcatcgcatacacagttctcatgccggccatgggtttttccgcagctcattgatttcagctccttctttatagggtatttgactttagtccttaacaacatatgtacccgtgccccacttggtgtgggtgaacgtctatatattcatcatatgcttggaaaataagaaaaagcagagcgtttttagctctgcttttaggttctagaggacaagagtgatgactaggacagcgatcagaacgtttgtagctgtagagacaagggttgcgatatcggcatctactgttgtgacgtttacgccgcgggagcattcgataagaagtttctggcggtttacttgcttgttagctgtaagctgcaataaatcttgtgcgactaattcagcaataacgccatctgcaatggaggtgagagctactgtcaagacagctgcattaagcgctgttacaatagatgttacggcttgaacgtctgtagatgaaacgttgatgtcacaagagtctctaataataatcgtctcatctgagacttgtttgttgagatttgcctgagctagatcttggtcgataaaggcgttgttgtcattgccaaacccattgttattgcagcaaatatcgcaattgcattttctttcttctttttctttctctttgtgctctaacggatggtcacagtcaggatcaagtgcaacccaagagtatggtctgctttccatatctattcctccttttcttttactgttattaaatgagcgagcctcttactttgactgaggcatttatcttgatgatgtgccctattttttatgattaatttgaattgttattgttttgccgtctttgtctgagctgttcaatgagctgctctctgcggctaagcggtttatcgctcttttgctcttgtacggcttcttcttcttttttcttcttgtgtttttcagctagctccgctgatttcgcttgcaggtcttttaccatattcaaaagcatttctttttcttcatctgatacttttttcattttgtcttttgtgatgccgtgttttacaaatatgttttggaccagcattttcatcattggatcaacttctgggagcttttcaagctcttctttgattttatcgttatctgacatttgttctcacctcaacttttagtttgtgaaaagaaagggttaaaggatgtcgaattcaagtagcatactgtttaacacctgaagcaagatttgtacaaaggttattatttcgtctgcagacaaagtaatcttgatgtttcggctgttgataattttaatgatggttctttttttgatttgagagttatcgagaatgagtatttcgcttgctactgtgtcggccaagtcctcgtcggcaataacgagctgtgtcagcaggataatcaatgttgtaaccaaggcttgtatagaaagggcagatgttatatgtgacgtatctattgtgatattttcgcaatcaatcacttcgatctgctgctcgaattcgcttgataattgctcaaatatgtcaggatgcagggattcaatttttgtttcaaatgacataaccttcactcctttcttatccatactctatataatgcaaatggggtgcagagcggaataataaaaataaccaattttctgccggacaagatacaattcatgaagaatagggttttcgcatatatgtgaagggatcatgattggcaaaggagtgaacgagtggttataaatgggctgacaattgttcttctatcgcttgcggtctttcggctcgcccgcctgctggtgtttgacacgattatggcgccgcttcgcagtctgtttcatgaagagaaggaagaaaaggatgcggacgggaatattcaaacctatatcgtgattaaaggaaccggtgtcagggcgtttattggtgaattgctgagctgctattggtgcacaggcgtgtggtgcgccggctttttgattttatgccaggcgttgatcccgcaagcggcgcagtggctgattttacttttggcgatcgccggccttgccggcatcatagaaacgctcgtatcaaaatggctgcaagaatgaggcgttaccaccagcaacttttcactagcatcagcataaagtagcatatatgacataaggaaaggaagggaacaaaatgaatcaattcaataaaccttcccaaaaatctccatatacagattcgtcgtatcaatcaaaaaagataaaaaagaaaggctgcgggtgcggaaataaaaagaaaaagcctcaatagcctggcaaagaaaccggagaactccggttttttgttttttaacggagcggcctcgctcagcatatatcataagcggggggataaaagtgaatgagtttgaaaaatggatagaaggaagatatgaaccacacgaacaaaagcaaaaagagtatgaagacacgatgggccgtatcagaaaagacttggatgcatttgataaagccggtctggaatttgaagatgagattgaagagctggctgaaaaaacggaggccttacttaaaaaacatcaagctcaatatgatcaatcgtaaatccgcaaacgccctatgcgaatatccaagccgatccaatcagctcacatagtgtatagagagtaaaggaggtgcttatctatgggctttggatacggattcggcggcggctacggcggcggctgttatggcggttatgctggcggttacggcggcggctatggttcaacatttgttttgttggtcgtattattcattctcctcatcatcgtaggtgcatctttcttttaagatgtattgaggaagtacgggttataacccgtgcttccttgccttgtgtttatttttaaaaatgttggaaaagcacattgtattatgtgcattcatacaataccgtattactccgccaaaaggaggcgcattatggataatcaattttttaagaacatcgaaaagaaaacaggtgtgaagatgcaggatgtaatgaatcttgccggatcactccaaaacgctaattttaaagatgaaaatacagtgcgcagtgtgattaaccgcgtagctcagatggcaaacagacgcgtgccaaaagaattagaagataaaattgtggaatctattacaagcggaaaagaaaagcttgattttggcacgatttctaaaatgatggataataaataagtggatggcctggctgactcactgcagcgggcctttttttacagtaaaaacccggcagtaatctgccggactgttaatgatgcaagggctgtcttgctttttgtagaaggggatacaaaaatcttgagcggttggctgttttgccgcgcctgttagcggggcaagacaaatataaatgctgtttcgcccgggtcatggctacatataaaagacgtctttcctcctcaagagcggcctcgtctccttttcttgccgtttctaatgagaaatcgtgcggaatcgagccgtctacagtgcctaacacgtagactgttttgaattcaaggccttttgaccggtgaatggtcatcagctgaacgccatgttcatccgttctgtttttctcagcggccctcatatggtctacgtgggcaagaaagtcaggaatcgttttgaacttcttggcgacaaccttgatgtcgcgcaggtcatcggaacctttttccagcttgttgccctcattgccccgcttttttaaatactcggagaagcccatttttccttctgcaaaggtgatggcttctacgggcttcatcgtgcggaggcttgcaaaaaacggtacgattttcttgattttgtccagctggaatggcttcagatcaggcaatttggccagcgctttgatcatggtacagtcctctgtaatcgagagcgccttcagcgtattcaaagcggactgttttaaaaacaaggcgggaagcaagtgtttaatcgcctcggtgtcatcctcattttggctggcatacaagtaggcgagaatctggcggacgatccgtctgctgtaaaacgattggacgccgcggtcagctgtatacggaattgatgattgatgaagcctttcataaatagcacggcctccgctgtttgtgcggtacagaaccgcaaagtcttctggactggctccattttgaattttttctttgatatcggaaacgaccattgtggcttcttcctcttcatcataaggataaaacagcacagggacctgaatgtcatcgcgggccgcttcaagcgttttggcatatctgtttttgttctttttcacaacgatatcagcactagagacgatcgggtgcgtagacctgtagttcgcagttaaatagatcgtcttcgctcccggataatccttttgaaaatcaagaatgaaagacggattgcttccgcgaaacgcgtagatggactggtcatcgtctccgacacagcacaggttttgctccggactggcgagcatttgcatgattttgtattgaaccggattaatgtcctgaaactcatcaattaagatatacgtaaaccgagattgatattgttccagaaggtcaggccgctcgataaacaattcatagcaggctgaagccatgtcatcaaaatcaaattggctgtgttcttttttctggcgttcataatgttcatataaacgataaacttgtttttcccactcatcttttagagggatgcgttcatttgggacataagtgtttttccaaaaaccgatctgctgcagagcttggtcaactgggaattctttctcatcgatgccttcttcatagagtgcttttttgatatattgttcccgctgccactccattttcagcagatgctcaccgttccatttagcagaattagagtgatacaagatcttataaaacagactgtggaatgttcctgtcacaagtcttctgacttttgccggctgtaatccgtactggttggccatacgctctttcatttcagcgacagcttttgttgtaaaggtgacaagcagcatattttcaggcggtatgcctaagtgttcgatcatgtgggcggcacgggctgtcagcacccgtgtttttccgctccccgcacctgcaagcacgagcagcgggccctctgtttccgtgacagctttcagctgatccgtgtttaaaccgacagacggaaaaaggctcgtatcgggttctattgtttttggcacaaatggtgttcctggtttaatgcttctaggacggtgccattccgtaacagctggggacgggtcagcggcgatcgcttttcccttgggtaaacgaatgacaccagattcctgatcgtcttcttttttttcctctttagagggcttcggttcgcacgcctcctcacatgccggaaaatcgcctggctggcgatggataaactctggcggatcggcgatgttaagccgtaacaaaacgggctttccgcaatgagaacaaaataaatgtccttttattccctcttcaaagaggaattgataatgttctctcgaatatgtatgtaaatgtatgattctatcattcagtcgggcgcatttcaaaaaggggtcctcccaatcaaaaggtgttcattacagacaatgactatcatatcaaaagaaatgtgtttcaaaaagtaagtttaagggaaaagagacagcagaggggtgggtattgtatgatatatgcaggtcaaattcagaaccagcaatacgctcaatatgctaatagaacgattggacataagcaggattatgccggaaccgaaaaaatcagctatgtcccgtttcagcgggtatacaaagaactggaaaagcagcaggagaatcaaacggcagctgaaagaaaagtaaacgagatgaaacgtaagcgctctctttataagagattgcgagaaaaaggaatgggcacatatattaatcgatatgtataaaaaaccgttcataccagagaacggtttttttatatgcagtaaaaatccggatctcaaaagatccggatgcgttcagtccttcatcatttgtaagtgcggaatgccggcatcgaggaattctttttcagaaagcacgcgatacccgtgtttcttgtaaaacggcacagcctgtgtttgcgcgtttaaaatgaaaccggaagcgcctccgtctgccgcggctttttcgagcgctttcataatgatgccgccgacaccggctgagcggtggcttttcagtacgcaaatccgctctaacttgccgtagccgtccttcatgcgccatcttccggcaccgacaggcttttcaccgtcatacacgatgatatgctctgactcattttcaagttcgtcaatttcttcttcagcaggcacgttttgttctttgacaaagacttcttctcttacatagaatgcatctttcagttgttcttcattttttgcgataactgctttcaaacattattctcctctgcctagcaagaaggtttcatatactgtccacgatccgttttccagctggtaaagcaagtggaaacggtcaacgatttcttcatgcgacacttcctgcatttttaattgtcccagcacatctgaatgctcatcgtcggagagattttggccgaccgtcacatgcggaacgaaattatattcctgttctcctgccaacacaccggtgtatagcttttcattgagtgtttttaactcttccgtcggttctgctttgatgtaaatgacattattgacaggcgcaaatgagctgtattttgtcattttgagaacgagtgggtgggactcttttgcgatgtttcttaaatgtgatacgagctgatccgctttctcctccgcgcattcaaaggatgctctcagcgtcaaatgaggcgggattagagagtagcttgggtcatagcgctttctgtaagagtttgcaaggtcttggagcttttttgatggaaataaaacgattccgtatttcatattatgtccctcctggaaataaagtatgatagagtgttaaagcatttttttcagcgccggggtgatgagcggctgccagtatgtccatttgtggtctccgtcaaatggctcgaaatcataatcggaaagctttttctccagcagctgtttcagctcccggttcggttctgtaaagtccagaatgttcccgtctgtcgtgtggacgtcagtttcttttgttccgatttggtgataaatagagaggtgtttgatatcgtctgactgttttacggcttctagtacgtgtttgtcaacatagggagactgcatgatgatgttgccaaacatattcggataatcaagcgctgtcataagtgacacggttgctccgagcgaatcacctatcagcgttcggccgtaaccgatctgataggttggatactcatcatctgcaaaaggaacgagctcatgggcgatgaaccgtttataagccgaaaattttgaaccctccggatgataggtgtttctgcgctcttttacatccttataaggaacaccgataataatgctccggtctatttcgcgtttcgacagcaattcctcaacctgtctgccgattctccccagcctgaaataatcgtggccgtcctgcgcgataatgacatggtatttataaagcggggagtagttggacggcagataaacaagcaaggtcatttcctcgttaagctcttttgaaaagaatttcttttcttgcactgtgccgtttttcggtgccataaaaacattcctccaggacatcactatactttcttgcattttcaattattgtaccatgaattattagaaatttctctctttaaacggttcggcacacgaagaaaaaagtgttgaaataaactgtgaattgcgctaatataaaacaatcagaaaattgaaatcgatatttcttatcgtgagaggtggagggactggcccttagaaacctcagcaaccggcttgttttgcatgtgcaaagcgccaaggtgctaaatccagcaagcgttttttatgcttggaagataagaagaagcgttaaaccccttcttcttatgaagaaggggtttttattttgaaaagggaaggtgtcagctatatgtcacagcacgttgaaacgaaattagcccaaattgggaaccgtagcgatgaagtcacgggaacagtgagtgctcctatctatttatcaacagcataccgccacagagggatcggagaatctaccggatttgattatgtccgcacaaaaaatccgacacgccagcttgttgaggacgccatcgctaacttagaaaacggcgcgagagggcttgcctttagttcgggaatggctgctatccaaacgattatggcgctgtttaaaagcggagatgaactgatcgtttcatcggacctatatggcggcacgtaccgtttatttgaaaatgaatggaaaaaatacggattgacttttcattatgatgatttcagcgatgaggactgtttacgctctaagattacgccgaatacaaaagcggtgtttgtggaaacgccgacaaaccccctcatgcaggaggcggacattgaacatattgcccggatgacaaaggagcacggtcttctgctgatcgtagataatacattttatacaccggtcttgcagcggccgcttgagctgggagctgacattgtcattcacagcgcaaccaagtatttaggcgggcataacgatctgcttgctggacttgtcgtggtgaaggatgagcggctcggagaggaaatgtttcagcatcaaaatgcgatcggcgccgtcctgccgccatttgattcgtggcttctgatgagaggaatgaagacgctgagcctcagaatgcgtcagcatcaggcaaacgcgcaggagcttgcggcgtttttagaagagcaggaagaaatttcggatgtgctgtatcccggaaaaggcggcatgctgtccttccgtctgcaaaaagaagaatgggttaatccgtttttaaaagcactgaagaccatttgttttgcagaaagcctcggcggggtggaaagctttattacataccctgcgacccagacgcacatggatattcctgaagagatccgcatcgcaaacggggtgtgcaatcggttgctgcgcttttctgtcggtattgaacatgcggaagatttaaaagaggatctaaaacaggcattatgtcaggtcaaagagggagctgtttcatttgagtaaacacaattggacgctggaaacccagctcgtgcacaatccatttaaaacagacggcggaaccggggcggtcagtgtaccgattcagcacgcctcgacttttcaccaatcttcatttgaagagttcggggcatatgattacagccgctctggcacgccgacaagaacagctctcgaagaaacaattgccgcattggaaggcggaacaagaggatttgctttcagttcaggcatggctgctatctcaacagcatttttactgctgtcacagggtgatcacgttcttgtgacagaagatgtatacggcggaaccttccgtatggtgacagaggtgctgacccggtttggcattgagcatacgtttgtcgacatgacggatcgtaatgaagtggcgcggagcatcaagccgaacacaaaggtcatttatatggagacgccatcaaatccgacacttgggattacggatattaaagcagttgttcagcttgcaaaagaaaacggctgcctgacctttctggacaatacattcatgacaccggcactgcaacgtccgcttgatctcggcgtggatattgtacttcacagcgcgacaaaattcttaagcggacacagcgatgtactctcaggtttagctgctgtcaaggatgaagagcttgggaagcagctgtataagctgcaaaacgcgttcggcgccgtccttggcgtgcaagattgctggctcgtgctgcgcggcttaaaaacgttgcaggtccgtttagagaaagcgagccaaacagcgcagcggcttgcggaatttttccagaagcatccggcggtgaagcgcgtgtattatccgggactggctgatcatcccggcgctgaaacccataaaagccagtcaacgggagcgggcgccgtactatcttttgagcttgaaagcaaagaggccgttaagaagttagtcgagaatgtgtcacttccagtcttcgctgtcagccttggcgccgtggaatcgattttgtcctatccggcaacgatgtctcacgcggcaatgcctaaggaagagcgtgaaaaacgcggtatcactgatggcctgctccgtctgagtgtgggcgtcgaacatgcagacgatttagaacacgatttcgaacaagcgctgaaagaaattgctccagttgcggttcgttaaaaaagaagccggggatggcccggcttcttttattattgttcgtcatcaggattcagaatcgcgaggacttgatgatcctcccaaacgccattaatttttacattttttcgggcgatgccttctttatgaaatcccgctttttctaaaacacgcatggacccgagattacggggcatcacaccggcttcaatccgatgcagtttcaattcgtggaacgcataatcaacaaccaatctgactgcctctgtcataatgccctttccattatgggctttgtctaaaaaatacccgatgaacgcagtttgcagcgcgccacggatgatttgaaagagcgaaaccgtcccgattaatctatcgtctgacgctgtaaagatgccaaaatgatattcttcatctttctcaagtctttcctgatactcggttattcgttttctttgcccctcaaccgtatagtaatcgtctgcgcgtatcatagaaaactgttcgaaaaaatcccgattttcgctttgcagccgcaaattttcttcggcatccgttacttctaaaggtctaacataaatggtttttccttttaacatacagtgatctctccgttctcatgtcagcattcctcttacattattctcagggaaatgcaaatatcctttttataagaaggaagaaaaccaatttcccataaaagtgccaacatagttgccgattaagtagccgagcgtaccgacaagcatgatcggggcaacaagctcccgccatcccttggcaattgccatcgcagccgcagtcgtcggtcccccgacagtagcgttgacggcgagcagaatttcttcaagctgcacacggaacaattttccggcagctaaggaaaccgctaaattgctgatcgcaatgataaacacgaataatagaataagaggcgcattcgtgacgattaaacggagatctgcaggaatgccgatcaccacaaaaaacaaataaatcaaaaaggttccaagttcctgagatccattgagcctttcaaaaaaacgtgggaaaagaaaaatgataagaacagttaaagacgtaagcaccaggtactgatcaccaagcgtaccggtcagcaggggatgagaaaaaatgcttttaaaataaccagaaaccttcatacttaccgcaacaagtgcgaaagcagcaccggcattaaaagctatatcctttaaggaaatatccttccgtttccaatagctttcagcactgtttccgctgtttccatcggcttttaccttctcttcaaacggcatggcataatgccgctgaaaccatttgagtgcaggaatgctgattaaaataaaaaacaaaagcgccatcataaaattatcagccacaacggtagccgacacatattcaccaggcgtctcaaattttgccgccatcgccgcaaagttgaccccgccgccgatataagaggcgctgatcatcccgccgattttatcgagatagggaatatgctgtttaagtagaaaaaaagcaagaatgctcccaagcacagtgccagcggagctaatcagaaaaataaacagcaaacgcctgctttccttaaaaatttgccgaacattgatctgaaacaataaaagtggtatcgccagcggcaccacataagaccacacagtatcatacacaggcgactcaacaggaagcactcctacatttgtaaacaccatagcacctgccagcgcgataatagcacccgacacagcggacgcccacttaaagcgctgctccagcccgatgctcactgccgcccacaccgcaataaacccccacaatacccatacatcatcagaagaaatcaaagaatgcaaaatcccatcacccctattgttagaaaattaagacatattataatagccggggaacggaacagcaagtccaaaaaaagtttttctaaaaaagcagttgacgaatagaagggaaggttatataatagaacttgtcagaaagacaataacatacccagcaacacatacatatcatgattccgtagctcagctgggagagcgctaccttgacagggtagaggtcgctggttcgagcccagtcggaatcatagcttaaacccttgcgcagcaagggttttttattttgcttatttattgattttgtctcattcatcgaattggggacgaaattatttttttgagctgattttgacgaagaatctcaaaatcaactctgtttttgtgctaggtttctaggatcgaactggttaaagtgttttactgtgctattttcgagtttctcggtaacgtggccataaatatcactagttgttcgagcactggcatgtccagctcttctttggatagcaactgagactttcgccagcttccataaggagagccaccatagtatgccgcaagtcatgaagacgaacatcttttaggccgtacttcttttttaattttagtccattttgcggtaggggttgtatagtagtaaggttttcctttaccactgtgaaatacaaattgatgttctccgccttcccaggcatcgccaagcaacaatttttccacttgttgcctaaaaagacaatcaaacgcttaagtaattatatcttcaatatccaattatctattctatcgcctctttccatattaaaatcaactctaaaaactcatcagtttctataatactttcaaaaggctcatcaacccggtaatgatgttcagctattgtcttgtttttcttaattattatacttgtagcattcaacgtaatttcaaagtcttcataatctcctgttaaaaccttcttaacgtatccaatatactcgtctgcttcctcttttgttgaaatatcctcaaaaacgtccgagaaaatagttaatttttccggtagtattattcttgtgataccaaatggatctttttttaattgatatgtatatctcatcttgtttatcaccttctatgttatttattatacaaaggataagcagtggctattgtaccatccttgtttaagaacatttctattttaattcctgttgaattttcacctataaacttattagcacctatcttttttttattttgatacgcttcatcaatagcctttaacacatctacacgattccattcctttggaaaaaaactagatttggctatttttctcttcccgcttatttcaacattggcttcataaacaccatttttatcaggtgttttctcggaaccaggtataatttttccacccatcatactttcatgatgatatccaactgctttaccgcgtctattaatttcaccatggtaaatgtgtttcatcgttcccgtattatatttacccgtatccttattgttagaacgttcagatcttctgagaacactctcttttttattttcaatcatactttttaggagaggagtattttttgcgttatacgtattctcgatgtcttgtgcaatcccaaccagtgcaagatcattcttatttctaataatagaattgatgtaagatttgcctttgtttattcctttattgacatgagcagcggctgttccaccttcaaccactttacctactttagaaagcttggtagtggtttgcaccgcggcacccgcaccttttggaccaacgatatttccgatcacataactgatataatgacctttttcatatgcatcaccatttaccattttatcattccatgaatcggcgaggtttgtccagatgatttttgaataagaaggtacgctcaaaatggttgtaattgtttttgtcagtttcagttcgatagggagctgtgaatattcccatgcgcccacagctaagtctttgatgccatatatggtatcgtcaatcacatcgtcaataccatcatcaactccctcaacgaaatcaattactgtcttgctggcattgattatacttttaccgacggccttcagctgttttgcttgttcaagctgcactgcgtattggagctgttcaggggtaagattctcatagccgaccttcttggcaatgtctaagtattcatctggatccgtcactccgtcagctagcttctttttcagctctttgatttctcgttctttcgcttcatctttcttgatcttcaaataagcttcagtctgtttctcgatatcgccttttttcttatgtatgtcactttcacggtacgccttggcgttgtagtgaatgggcgtagcgtttttcccttttcctgtggattcctcaagcttttgaaagtccttcttgatgaattgctcgtttggctctgattgggcatattcagtaacaagtgcttcgtccacgctgcctagtttatcgactgtttttttgcgtttgtcctctgcatctgcaagttcgtctttaaagtcttctgtcgagaacaaatcaagtgggaggatgtcatcgatatcatgtaagatatctttcaacgctttcttttgttcagacattatggattttgattttgtgtaggcgttagccagttcgtgttctaagaaggattcttctatatatgcatcagacaagctggcgtcctctaaagtgcctgaaatgcttgttaagaaagcaattttcatatcaagtaagtcaatccaattgtcagctacacctgcgtggtcttgataaaatgctttaatgttgtcggcgcctttgccggaaaactcactgtcatctaaatcagctacagctttaaaggctttctttagattgaccatctgacttcttaattctttgtattcctttgcacgtttatctgcttctgaaagcagtgatttggcttcaaatactttcatgttcatatcctttcgtttgaatagctccaacaagattttaccatgggaaaatgaagaaatagacagcgatgtgattcaaaagtgtgaaatgaataatttgatctgtgtcaatttacctatttggattatttgtttggaaactgatgacgcagtaagacgattccagctgatgaatggtttaaatcctgatggcatttatggtcctaagactaaagctaaactcgaatctcttcttaaataaaaatagccctcctcaattggagggctatttttatttaatagaaacgtgatgtgtgtaccagtttccggttgcagtgaatcgtaattccatatggccgtggcggttacctccatactttacaaacgtgtaatcagaattggcgattgcatccttagccgttttatcaatgtttgcaattttcttggaagtgattttaccattccagccagcaaaacctgaagcggatgcacttggcgggctttcccactttgttattttctttccatactcgtatgaatagttgtcacttactcgaatatcatataattttatccctgtaaactttacagcgtaatagccacttgcagttttattttgggtggcctgtgtttttatcttttccattcccatatctgtacttacgcccatttccacagtgaaaccattaccgagatcaatttcttgatatggatgatctttgctgacatgcatactgtttaaagccttattcacttcttttacagttgggattttctcagatgaaagggttctcaagtttttttgttttgttatctcgtgaaaggtcgccttatcaataatcagatcagaattcttgtccactttttcaacagcatctgcactttgaagactaaacagagatgaaaaactcaaagctagggcaaaaaccacacccacaagtaactttttcattttatccctccttaatgttttcgtccccatcttatcttaatgtataatattggtaaatgagacgaaagtaacaaatgatgctattgattaaagtattaggctttgaaggaacgggaagatcgaaaagtaaatgaatggttttacccatttaaacaaccatatatcaggtgtatattggattgtaggggagggatatcatggtcaagatcatattggcatttgtttatctatttggcttcgttgtgttgagcaattgggctttcgacggaatattttcagagagctatttctcgccaatcggtttcctttggtctatcttatttacatttttcataggggtttataccggcttgcctttaatctacaaaaagtttactcaatcaagccgtttgactttgaaaagtaaaaagccaatttatttcactatcggtacagctgttattctctttgggctttattttctcaaaaacgaaatcgccccctatttgatgctatgtggctattttttaactctggcatcaggtatagccctgaccatcttattacagcccaaaaccaacaactgtaaaacagtataactaacaagaactaatgaaagcccgtctcaaggcgggctctatatcaaaagaaagggaatttttttgtgatatctatttacaatggtcaatagatattgtataattaaggtatagaaaggaggtgctgaagtggacgaggtaagaaactggattcttgctatcgctggtatcgtgaccatcattaaacacatctacgacatatggcagaaggaaagcgaaaagcatagcaagaaaaagaaaaagcgctcccgccgggtaagcaagaagcgctgatacacagtgagcaaaggggagtaaatccccttgctcataccattatatcacgtccacgataatatgaaaaaatattttaagcagtacaacacagcagattttgccgttttgcttatattggttgccgggatcgtcgcaattgatttgaccgatgagggtatgtctggaaagattgcgcatactgtattgatgatagccgttgttattaccttgttaaaaggattcattatgatgtggagagaaagccgacatgaaagaaagcgaaaaaattaagtttatccaggaagaagttttgactgcagcggaagcgggggagttgcttggaatcactcggcagcgattaagcacccttgtgacttcaggaaagctcaaaccggttaaaaaggttgggacagttgcattgtttttgcttggacatgtacaagcccttaaaaaagaattagaagcaggccggaagaagtaccggccgtatgatgagtgaatcccttctcaagatgagaatgattacttgtcctacttttgccacttaataatgagtggtaaattttatcaatttttgatatcctgtaattaatcataattgcgggggttcattatgaatgtatctgaattagttatttttccagatttattaaagttaccaaaaagcgatttggaggacatttgcaccaacgaaggtattgcggaatctggaggggcttttgaactagcgaaaagaatatgggattatgctgatacgtcagaaaaaaaaacaaagaatgtttacaccgtattgtcacaaattttttgctggtaatacgtcaatttcttggtacacttgtgatagccttgaagatttaagtaaatatattattgaaaaagaaaggcacaatccatttgaaacaaaaattccgtatgaagaggcaaagctaaatacgactccaaagttaagaagtgcatctagaataaacgagcattcatattttttaaggtttatatataaagatggtactcgtaggattataggtgaagatatagaggttttaccgacaaataaaacggctacagcttttatagatgaactaaacggaattatagaagttagagctaaaccaaatgatgctgaaaaaatagcagaggtaattgctgggtatgcaaggcagcaactgtctttacacaagcaaaactttattaaacctttcgggggtagtatagaaagtatagcggataccctaggtggtaaactttacgagtccaaagcaagtcctgagttatggatggacaactttggggaagaagaaaatgaagcattgcttgatatttttgaagctttaagtaaatactttgagaacggagatatagataaacttcaagaatgtttagataatgctaaagagattttgggtggggagctacttagtttaccttttgctgtacttgtacttgctggtatggggaatgtaggtttaaaagttgaacaaaaagatttaaggaacactactttatacaaagtatttaaaccctacttacaaacctcgggtggatatattaaatttgaagttgaggaaaatggtgttcagcacgagttttcaatggttgttggagttgaaagccagagcatctattttcgctctaaaaagactacagaaactgtaataaaaaaggtaagagaaaaacttttattgcaaaaattagttgtgtaaatatttgaaagagggtgatcttatgggtataaattggaaacaaaaatcagaaattgacgaagtgattaaagaaatcgcttgttcaagagtaattagattttatccaacatatattagtaagatcactttaattaatttagatactgtttttgaatatttattggagttggtagatgacggatctctaaatatattgtgggaaataagatgtcctgactttgattgtaactctgtaattttgcgaacacataatttatcagaaataatgggtaaagaaatagaatgtgattattgtgaaaatggtctattagtcagaagacaacatgtattccctgtttttgaaataaatgatgactttagagaatttttaaaacaaagtaaaaaaaaacaagtgaattatctacacgctctataagttcaccaattctccaagaaaaagcattaatttctttagaagacattaatttattactagaagaccgaactaaaaaagaattgaatgaaaaatctggagtgaatatatataattttttatacgttgagggtgattatgtggagaagaaacaatctttgggtagcgtaaaaattggcggaaatgtagggaattttgcaatccaaaatgaaaacacaacacaaactaatggtaataatgaagtaagcagagcatttgatgaaatttttgaacgaataaagggaatcgagaacgatgttcaaagggaacaggccatttttaatgctgaaatattaaggaatgcagttgaagagaacgatgtagataaaggaaaaagagtattagaatttttaagaaattcaattgggacaattggatcgttaacgaccattgctaagttctttggtattactatataaataaggcccaaaagggctttttttatattatccactttttctgttgcttcttcaattcacctttcatcaaaaggctttttacagctatacgaatatcctcttcactctttcctgttttccttttcaaatcgtccagagttggattctttccatacaaatgcatattcactatgatctgatatactttccgttcaaaatcagtcatttgatcatctcctagaaggatgataatcgaacgtatgttcccttgtaaataagttggatttggggacagatggggacgaattggggaccaacttgttcatttttagtcaaaacagaagattttttatcagaaatacttgtcagaaaaccccataaaataagatttcgaaataaaacatccgttcgtgtcagaacataatcactaccttgacagggtagaggtcgctggttcgagcccagtcggaatcatagcttaaacccttgcgcagcaagggttttttattttgcgttaataaagccggttcgtcaaattcgtgagttgttggcgaactgttggcgaaattcattgaccgcagtccaaaaactacctccaaacttacttgattagttcaatagtaacaaacggaagatcggatttctgttaaatcttcattgagaatagccagtccaagaccgtcacttcagccatgcatcttttaaatgaaattttgtactgaaaacatcaattgtatttttaaattctgctctagaatcagcccctttataataatcttgataaattgcttggggtgatactgattcgtgatttgtgctatggtttgcaaggcttgtagcaaaagcaggagcaacagaaacgagtaaagcaagggataatgcagaaccagttaaagctgttttcaatttcattttaagcacttccttttttaaaatacaactttattattaaatggaatacaaaaatatccaaggtgttttttgttagtaagttgagttagggggattggatggcacttagaatattgtttctgctgatgggatgttgattctggatatatttccaacacgattacaggccggacatgaaagcgaaccttgctttgatcggggcaatcatttcatttaaagctgcggtttactttaaagatattgatgtattgagagaagaggaaaacaaatgaacggaatttctgagcgttggaacgcgtttaaattacaaaaatcccctgaaccactctagatcaggggattgctttcccaacagcttattaagtagcggaaggcatgatcaacgatttagtatcaatttattaattgcgaatactagaaacataccgttttccgccttccttagaagtaacatattcccgaggaacgttaagtctattggtagaatgataacttacataaagtttcatatttgctcggctcgttacgatagccgtatgatccatccaaccatcagcatagcgaagacctattttattatggtaatcatagtgatatacatctccaagctttacatttgaatatgtatcagaaacagtcttcatttttattccgccagcttttaaaatgtatgatctaaaggctcctgcattaacccaagcatctgtatagggtttccattctttaaagtacggcattcttccagctcttaatgcttgggaaacaaagttagtacaatctttgtctttataatatttatagtttttatttggttttaaggcatatttttctgcatatttcattgcagcgtaaccactatatcctttaacagatgttgcagtcacagttagttgattagagttagcagcattgaagttcatacttactggtttatcttcacttttcacttcttctttatcatcatttttcacttcttgcttataattttttaaaaattcatctaatttaacatccgaagaatattcttcatcattttcatattgtagagttgaagaagaattatttaattgtgttacatttagttgcttagaagaattactcaatggtattacatttagttgattagaagaatttttaacttgagagaaacttagattagaagtatttgttgattgagaactttgtttattagaagttgttttgggaatttcaagtttaatattatcgcccagagatgttgttactttttcaacaccaaaaacaaagtttcgagtaatataagcttcaacaattagcttattgtttttttcagaagtcttaacatcgtctatatcgtatgtaaactcgtggaatttttgtttgtccactttacttaacgcagaatacagtaagactccttcgtcggaatcagtcaatttagactctttaggatgcgctaaaggagtgttgtgttcaaaatcatatttctgttgttctaacatatccttaactttttcgtaaccaatctcgttggtaattgaaacattttctttagtctctttattagtagtggctgcaaaaacttcatttgttgacactaatggtgacaatgatagacataaaactagtgaagaaagtaattcttttttcatacgaaacctccaataaaatctaaatataagtaatatttatcatttacaccaattgaaatatggcataaaatacatgtaataatataacataaaaataaatacataaaaaggtatcggaggaaaaaatgaaaaagaaaactaaaattatactttctctcttgacagcacttattgttatattgatagtacttccagttctatctcctgttgtctttacagcttcttcggaaaaaggagcaatcagacacgaaatttataaaagaggatatccctaccaaagctactttgcagttctccagaaaagagaaggagacaatgaatctgggaatctttattatgtaaattggctagattggaaagatgaaacagggcaaactcctcacttatgctattcgaaaaaagcatcagatggtgaatacgaagtaagttgtggcacagggccgtaaaaataaattttaaaattgaataagtccaagacggaaagcctgcagacactgatcgttttacagagaaatttgtgcttcgatcggtgtccgtttttttttcgcaactaaccatatgtctatcgcgattactagctatgaaaggagtaattagacatgaaacagtccaaaaagaaaccatcatagaagcaacatgagcgcttagatcgtttctggcaacaaatgatgaacactaacatgcaaacactcagacgtggcaaaggcggcgcaccacagaagaatcaaaacgctgtgactcacggctttttctctaaattcctgccagaagaaacgcttgagatcatggaagagattcaggagcgttcgcctgctgatatgatatgggatcagatacagattcagtatgcagctattatccgggcgcaaaagatcatgttcgtttctgataaggaagaaatgatcaaagagctgaaaaagaaaaggtccctcatatctgaggtcagcgaaattgaagatgggcttgtcatttgttttagtacgtggtttcgctacagactttacagtgaaactataccaaacatatttcacaaacttgataaaataacttttaaaccttcctataaaatgaaggttttttatttgatttcaatttttaaatcctttacatacagcgattgattaactcgagcaatcaatgtcgcagttatatttatttttcaagaaaatgttataatgaaaagccataaaatgataggagggggaatttcgatgcattacataacggcatgtttaaaaatcatcagtgataaagaccttaatgagataatgaaggaattcaaaaaacttgaggaagaaacgaacaaagaagagggttgtattacattccatgcttatccgcttgagccatcagaacgtaaaataatgctttgggagatttgggaaaacgaagaagctgtgaaaacccatttcacgaaaaaacacacaatagacgttcaaaaacaagaattaacggaagtagaatggttaatgaaaagcaatgtgaatgattgaaaggctctttaaaaaaaagacattcaatgacttagaatcagccacttgtgattaagtagtaaattgttgtccaactcttatttttttctatttaatattttttgagacgaaaatgttttttaaagctgattttaaaatgtattcaaagtcagctctgtttgatttaatggattatattctttggataacttgttaccatcataatggagatactccgtataaattggaggttaaaataatgagtcattctcaagaaaaaattgcactaattacaggagcaagcagtcaaggggatattggtacggctatttgtcgtaagttagcctcacagggtatacatatcttctttactcactggaattctgatgcggcctggatagaagaatttcaacaagaaattttacgtatgggtgtccgctgtgaggcaatgaaaattgatttatcagatgcacatgctgcattcacaatacatgaaaaaatttcagataaattaggatatccttccatccttattaataatgcagctcattccgcaagtgataattatgtatcgttagatgctaaatcacttgatgagcattatgcggttaatatgagatcgaattttcttctttgtgttgaattcgcccgtcggtttaaaaaatctaatttaatatcaggaagaatcatcaatatgacatcagggcaggatttaggtcctttgcctggagagttagcgtatgcagcaactaaaggagctatttctgcatttactaggtcgttatcacaagaacttgcaccattgggcatcactgttaacgccgtaaacccaggtccaacagattctacatggatgacagatgaaataagaaattttctttcacctaaatttccaatggggcgtattggcacaccagatgatgcagcacgaatgattgcttttcttgcaagtgatgaggctgaatggataactggacaaattattcattcagaaggtggatttattcggggctaagctactgaaacacaatatacaccaatgtatgatgtattcccaaaactaaatctaaacttgaagcgaaaataaggtcccttctctttttagagggggaccttattttattcatgcatgttttgcatccagaaaatctggcggataaagattaataaaccgttacatatacttttccgaatactgcagtacctttaaacaaagtaatcgtggcttttccttttgatttagccgtcactaaaccattttgatcgacttcagcaactttttggttatcagtccaataacgagtagctgaattatttttaacagaataggtttctccaacttttagaggtaaatcatagtcttgaattttgataacatgtgtaggtgaaatagaaatgttctttacctcagtaggtgtggagtttatttcatgagctgaagctaccccgctgaccgacagagctaacgcagaaatcgataaagcagaaacaacagtttttttgaaattcattttgaaacactcctttaaagttttttgtcttgcactataacaattcaataaaagtaattattttccttgtaaataaatgttaataatatgtgaacgatcaatttatttgagctaagaatattgtgtgccctgcacagagtttgtatttatgatggaaaattgctgagagagaatggccatccttaaaatgttaatagcacacatttgatgggtactagtttgttgagcgtgtgggaattttgttacctgcactttatccccgaagataccaaatcatttttcttcatcatgttcttactttcgtactcatacattagaaaatcttcgttctaaataggtgaagaacattggagtatttttatgaatttctgctgaataacgataaaaaatacattacatagcaaactcaaagaatataaaaatcgcttttttccggatgtttcggtaaaaaacgaaacttttgtctctatgattttattttataatgtaaacggtttcttatatagtatacttatactatcaatttgctcaagtagatactgacaggaaggatagaaaaacagatggaatacataaatacaagacaaaaagagattttgtatctgttgttatctgaacctgatgactatttagttgtgcaagatttcgcagatagggtacagtgttctgaaaaaacaatccggaatgatttgaaagtgattgaggattatctcaatgagcattctcatgcacagcttattcgaaaaccagggttgggcgtttatttacatatagaagaacaggaaaggacctggctaagccaacaattacatactgaacatttttcttctaggcagcggagcgatgaagaaagaatgctgcacattgcttatgacttattaatgaatccgaagcctgtttccgcaaaagacattgccgctcggcattttgtcaatcgatcttccattaaaaaggatttatacgcagtagaagagtggctgaagcgttttgatctcacactggtttctaggcagcggcttggattaaaggttgaagggaacgaaagaaataaaagaaaggcattggcaagaatatctgatttgatccacaatacagcgtttaccagccaatttattaaaagtaagtttttacattatgaagtagactttgtgacgaaagaaatcaaatcattgcaaaaaaagcattccctctatttcacagacgaaacgtttgaaagtttgctgctgcatacattgttaatggtccgccgcatcaaaatgaagcagccgatttcattgtccccaaaagaaatggcggcagtaaaaaagaagaaagaatatcaatggacatttgcttgtttacaacggctcgaaccggtttttgcaatccgctttcctgaagaagaagccgtgtacttaacattacatatattgggcggtaaagttcgttatccattgcaaacagaagagaaccttgaaaatgctgtgcttcctaaggttgtagggcatttaatcaatcgtgtttcagagctgaaaatgatggattttcataaggatcaggatttgatcaatggtttgaacattcatctcaatactgtgctacaacggctgagctacgatctttctgtagcaaatcctatgctcaatgacatcaaaaagatgtacccttatttgttccaccttatcattgatgttttggaagatatcaatcaaacttttgatcttcttattcctgaggaagaggcagcatatttgacattgcattttcaggcagcgatcgaacggatgcagggcagcagcgagacacataaaaaggcgattatcgtctgccacatggggattgggatgtcacaattgctgcggacaaaaattgaacggaaatatcaccaaatcgctgtaatggcttgtattgcaaaggccgatttaaaggattatatcaaaaagcatgaggatattgatcttgtcatatccaccattgcgctggagaatataacggttccccatattgttgtgtctccgcttttagagcctggcgaagagaagaaattaagtgcgtttatatgtcagctgggcgaatcacaccgccaaaaacaaaaaacgtttcagatgctgaacaatacgactccttttttggtttttttgcagcaggaggcagagcaccgctacaagttaatcgaacagctggcgacagctttgtttgagaaaggctatgttgataaggactatgcggttcatgcggtgatgagggaaaaaatgtcggcgacaaatattgggtcaggcattgccattcctcatgcaaacgctaaatttattaaacaatcagcaatcgcgattgccacattaaaggagccgcttgaatggggaaatgaaaaagtttcgctcgtttttatgctggctgtcaaacacgaggatcaaaccatgacaaagcagctgtttagcgagctttcatatcttagcgagcagccggccttcgtccagaagctgacgaaagaagccaatgtcatgacatttttatctcatttggattattaaaagcagggattattccttgcttttttttgttatagggaaaaatgcctttattaccggaacctatggtaaaaaaaagcgattttaatgagctgatttcggtatacagttgagacaagatcttataattcacactttaaaggagggttcctatgaaactgttagcgattacatcttgtccgaatggaatcgcccatacatatatggcagcggaaaatctgcaaaaagctgctgacagactgggcgttagcatcaaagttgagacccagggagggattggtgtcgaaaataagctaaccgaagaggaaattcgcgaagcggaagcaatcattattgctgcagaccgttcggtaaacaaagaccggtttataggcaaaaaactgctgtctgtgggggtacaggacggtatccgcaaaccggaagaattgattcaaaaagctcttaacggggatataccggtctatcgttccgctacaaaatcggaatccggtaatcatcaggagaagaaacaaaatccaatttaccgtcatttaatgaacggcgtttcatttatggttcctttcattgttgtcggcggattattgatagcggttgcattaacgcttggaggggagaaaacacctaaaggcttagttattccggatgattccttctggaaaacgattgaacagatcggcagtgcttcattttcatttatgattccgattttagccggctatatcgcctatagcatcgctgataaaccggggcttgtgccaggtatgatcggcggttatattgcggcgactggaagtttttatgacagcgcaagcggcgccggattcctcggggggattattgccgggtttttggccggatacgctgcactttggatcaaaaaattaaaagttccaaaagccatccagccgattatgccgattattattattccggtgtttgcatcactgattgtaggtttagcgtttgtatttttgataggcgcgcctgtagctcaaattttcgcctctttaacagtttggctggcggggatgaaagggtcgagctcgatccttctggcattgattttaggggcgatgatctcatttgatatgggcggtcctgtaaataaggtggcgtttctgtttggatcggcaatgattggagaaggaaattatgaaattatgggaccaattgctgtcgccatttgtatccccccgattggtcttggcattgcgacgtttttaggaaaaagaaaattcgaggcatctcaaagagaaatggggaaagcggcatttacgatgggtctcttcggcattactgaaggagcgattccatttgcggcgcaggaccctctgcgcgttattccaagtattatggcaggctcaatgacaggttctgtgatagccatgattggcaatgtgggagacagagtggcgcacggcggacctatcgttgcagtgcttggcgcagttgatcatgtcttgatgttttttattgctgtgattgcagggtctcttgtcactgctctgttcgtcaatgtactaaaaaaggatattacggcgtctcctgtgctcagtgaaactgcaccgacctccgcgccaagtgaagctgcggcagcaaatgaaataaagcagccaattcaaagccaaaaagctgagatgtcggaatttaaaaaactgacagacattatcagcccggaattaattgaaccaaatttatctggggaaacgagggatgacatcatagatgaattgattcagaaattgtcccgaagaggtgcgctgctttcagagagcgggtttaaacaagccattttgaatcgtgaacaacagggaacaacggcgattggcatgaatatcgcgattccgcacggaaagtctgaggcggtcagggagccgagtgttgcctttgggatcaaacgatcaggcgttgattggaatagcctggatggatcagaagctaaattaatctttatgattgctgtaccgaaagagagcgggggaaaccagcatctcaaaatactgcagatgctatctcgaaagctaatggatgacaattatagggagcggctgctctccgtgcaaacaacagaagaagcatacaagctgctagaagaaatcgaataaagcgggggattttcatgacgactgaaccgttatttttcaagcctgttttcaaagaaagaatttggggcgggaccgctttagctgattttggctataccattccgtcacaacgaacaggggagtgctgggcttttgccgcgcatcaaaatggtcaaagcgttgttcaaaacggaatgtataaggggttcacgctcagcgaattatgggaacatcacagacatttattcggacagcttgaaggggaccgtttccctctgcttacaaaaatattagatgctgaccaggacttatctgttcaggtgcatccgaatgatgaatatgccaacatacatgaaaacggtgagcttggaaaaacagaatgctggtacattattgattgccaaaaagatgccgagattatttatggccacaatgcaacaacaaaggaagaactaactaccatgatagagcgtggagaatgggatgagctcttgcgccgtgtaaaggtaaagccgggggattttttctatgtgccaagcggtactgttcatgcgattggaaaaggaattcttgctttggagacgcagcagaactcagacacaacctacagattatatgattatgaccgaaaagatgcagaaggcaagctgcgcgagcttcatctgaaaaagagcatcgaagtgatagaggtcccgtctattccagaacggcatacagttcaccatgaacaaattgaggatttgcttacaacgacattggttgaatgcgcttacttttcggtggggaaatggaacttatcaggatcagcaagcttaaagcagcaaaaaccattccttcttatcagtgtgattgaaggggagggccgtatgatctctggtgagtatgtctatcctttcaaaaaaggagatcatatgttgctgccttacggtcttggagaatttaaactcgaaggatatgcagaatgtatcgtctcccatctgtaacatagcagggcttgagaaataaatttgcgagtgaagacgcctattctgcagcaatgatctaaataaaataagagtttaatagttggagaagaaatgttacactcttttctgtatatggtaaagaatgaaaaaacacgattcggttggtagtccggatgcatgattgagaatgtcagtaaccttcccctcctcgggatgtccatcattctttaatatcttttatgaggagggaatcgttatgaaattaacgatttactacgatgatcagttttgggtaggcgttgttgaagttgtggacaatggaaagctaagagcctttcggcatctttttggcaaagagccgagggattctgaagtattagagtttgttcataaccaactcctgaatatgttggcccaagctgagcaggaaggagttcgtttacaaggcagacgtcaaaaaaagatcaatccaaaaagattgcagcgccaggtttcaaaagagttgaaaaacgccggagtagcttctaaagctcaagaggcgataaagctagagcttgaagcaagaaagcaaaagaaaaaacaaataatgaaagaacaacgagaacatgtaaaagagcaaaggtatatgctcaaaaagcaaaaagcgaaaaagaagcacagaggtaaataatccaaacaaaagcaggcgcagtgcctgcttttgtaattaaggactctactttgtaacatatatccaatgtttatactccgctgatttatgattcaatataaaccctaacttctccaaggttttttgtgagcctagattatcatgttcgcatcttgcggtgatccgggatactgtttctcggcttaatgcccagtttattagtttttgggcggcttccacacaataacctttgcggcgatgacttttatttgttgcaaaaccgatttcaatcatgccattttcgtctgggtcacctaaaaatccagttcctccaacaatttcatgactgtccttctttacaataatccatgaatcaaatccttttgttccattgtttttgactaaaatctcgcggaaataaggtatcgcttcaaaaaaatcagaatttggccattcaccatttgtttcataacctaagtctttgatagcctgatgatcttgtttagacgcggcgtcaagaaggggaatatcaatcgtttttaatcgtaatcgattcgtttcaaggagaaccatatatctaatcctcttttctttttactgggaataatgataacatataacaattttctctgataccttggcagtagagaaagatggaaaaattgagggggattgaaagagtgacaggggagagtttgcccagaccaaaaacgggtaggaaaatgctgatgttaatgtgtccctacccgtttttctgttcctgaatgcagggtttctgataacatgttgtgctaccttttcgcaatcaaataaagcgatatggctctttgggtttgaacaggattatgaatgataatgacccattggtttcttcgtcttggaaagcttgctaccgcatacaatggagcagtatcgcgcggagtgaacccaccatttatcacgttgatatctcttccttcaagatgacaaactaagtattcacctggattgatgacctgttggttcgtccatgcgtaagaataaaagccgtctccaagatcttcggtggaagatggggggacaaagccatctacagtcaatgtgatttctcttcttcgctgtctttctgaaaaatctggacttctttgagggttatgagtatgtgaaaagtaaggaattaacgcagggccataaaagtaatgatacaaagcaaccactcctttattttccattcatacaaattgtatgtgggagttatttgttcattcctgttttgttccatgtagactaataatgggctataggcgtccaaggaaatcaatttgtcctttcgttgattcaatgctagtaaccttgaaaatgcaggttaggatgatagaatttacttattactgcaagaagttagatatacatcattttgatagtgggtgaaaacaatggcgaaaaaaatggcaaaaacaaatgcggttcgtctgatagaacagcagaacatctcttatgaggtattagggtataaaacagacggccagccggtagatggcatctctgttgcggaaaaaatcggttatcctttgaaatatgtatataaaacgttggttgcagcaacaggaacaaatcattattatgtctttgttgtacccgttgcagaagagttagatgtaaaaaaggcagcaaaggtgacaggggaaaagaaaatagaaatgattgcaatgaaggagctgttagcggtaactggctatcttcgcggcggctgctcgccaattggcatgaaaaaattgttcccgacctatattgatgcatctgcagaaatgcttgattttattattgtcagtgcagggaaaatcggtatgcagctaaagttggcgccacaagatttagccagatcatgtgatgccgcatttgcagaaattgtatagatgcagatataggggaacgaaaaagcttagtcatatcgactaagctttttccgcatccctttcaaatatgatttcaaaataagcagctgccccatacccatctatactgggagcgaaaatctgaacgaatctccagcctcttttcgcataatcatggatgatttgctggtagtcttctttaggccttcttctcatcgtactcagctcaactcttacgaattcatattctttcatcgtttgatccctcctattaaggtatacgtaaaatggagcgagaagttccgaaaagcctcactaaacacagaaacatcttgaagagttaaggggctataaaaacgaatttcaccgggtcagcagtccaaatgaatctcttgcttattgcatttgactgagtatataagtaaaaaaagagcggtcagaacatataagaaggagatgatcattaacgcactcataacagggtagtgtttagcggagtagatgaaaaaatcaagctgtgaaatttgtttggggctgctgacggcatcaattccatttagcagttttgagagtttagcagtatagttccaatcaaatcgatctgaaacaagctcgcttccttgataccaattaacagcagctaaaaacagaaataccataatagaaaatccaagctgaacaactaaaaatattcccttcacttttgtatgacctccaaatctatgaatatgggaaaatcaaacaatatattaccaccgtatgggttattcttgcaatttcactttcatacaactcaaacgcaagtctatttttttgtttgtttttggcttataatacctgatgatggaaaaagagtgcgggtttatagattagagaaacaaatgtatttcttagcattttttatttgtggagagagtatagaagcattcgattagatctgctttttcacagaaacgcttttcatctgtttgcctgagctttacaattctggcaaaaaaacaatgatttctttcaatcaaaacatgcaacgatgcgacatattttatatcttgatgacttatctcattgcctttaagtcattctatcgagaaagtgatggtattttatgaacaaagaaaccctaaaaaacatactcatgattttttcaatatgcgcaaccctccgagaaaccgatggtatgcgcatagctgatagctggattttgagtgagattatacgatttttgatttgcatggctgtgttttttgccatgacatttctattagatgctgtttttccaaacaaaaaagagtcacattaatgtgtggctctttttgcatcatctgatcagaaacatcataaatgaatcgatcatcatgatgaagaacagcaagcaaaaataaataagcgagtagacaaacatatcctttgcccacttcacgtcatcgtctgttttgaatcctttgatgctttttttgatccatatgcctccgagaaccaaggcggctaagaaataaaatgggcttatatggccggtgcctagagagaaaggaaataatagcgtgaccggcaccaggacggcaatatattgcatcatttttatttttgttacatgattgcctttgactactggcaagagcggaacgccagcagcgcgatattcctctttgcgtcttatcccaatcgcccaaaaatgcggcggctgccacagaaacataatcgtgtacaacagcactgctgtcatactgaagtcaccggttacggcacaataccccatcaatggcggcgcagctcctgggaagctcccgacaaatgtgctccacacagacgttcgtttcacccataccgtatagatgatcgcataaaaaataaaggcggccagtccgagataggccgttaatggattgagggaataaagcatggcaaggcctgcgatccctaaaacagagccatatgttaagatcatggctggcggcattttccctgtgaccgaggccctgctgcgagtgcgtgccatttttgcgtccatatgccgatcaaaatagttgttatagacagtgccggaagccatcacaaacgcggttcccaacattgctgttaccattgtcatcaaaaaagccaagccggttaacgttttttctgcgcttgcaaacgcgatccaaaacccgccgaaggctgctatcgagtttgatatgataatgcccggctttgcaagtttgataaaatcgtaaatggttacccggttcgaagcttttatgtattttgtttcagatatggctgcagaatctcttgtattctccaaaaatagacgcctcccccaaaactgcatgcttttgttatcgtaacaagagggggacagaatcacaattatttcctatatttgtcatgatattgtcatttttaaaacaaaaaaatggggagctggactgcccccattttgatatgcggcgactagtaaccgtaacctccgccatatcctccgccataaccgccgccgtaaccgtgccaagggtagtaaggcggtcgcgggcgcgggtagtaataaggcgggcgcggataaaacgggtagaacggataatacggtcttggataataataaggcggataaaatggcggtctcggacgcggataataataaggctgtctttcatcataaggggtaatttgttcaaatgactgttcattcaaagggtaatccaagaggaaaacctccctagctttttttattccttttaccatattcctgatgcttaagttgggtgtatgtacattcatgaaattcggttttttttatgatgaaattccttaaaaaggattgacatgaacttctaaatctcatagtattacaaatgtgaaataaatgttactacaatgttacaaaaacatttctaaatagatacagttccaactgatgaagagtaaatcgaaatggctacgaaagaaggagtttttgttgttggcaaaaagaatcaaatggtttcatgtattaatagcagttgtatgtgtggtgggccttatcggctttttccataatcattcattgaaaaaagaaacggtcatgaataaagtaagaactgattctcaatatgggaatgttgagatcgcaacgcttgtgaatgacgggaaaacttttaattacgcggttaactatcccgttttcaaaaatgaaaaaatggattcggcattaaaaagattcgcagaaaaagaggttcgtcaatttcaaaaggaaacaaaagacgttgaccaagagcatacgacaaaacgcaacgaattaaatgttgattataaaattgtccattatgccaaacagacagtggcgattgtatttaatgaatataaatacatcggcggggcacacgggcaaaccgtgaaaaaaacgtttaactatgattttagtaaacaagcgtttctttccattgatgatattttcaaagaggacgctgactacttacataagctttcgttaatcgcttatcacgagctgaaaaagaataaggacattgccgcggacgatgcactgttaaaggaagggacggctccgaaaaaagaaaatttcagccgctttgccatcaaggaggattatatcgaactttactttgacacatatcaggttgcagcaggctatcttggagagcaatcgattgccattaagaaaagtcttttgaaagacattctgaaagaacaatatattgataaagcaaaaaataaaaataaaatcaaagaacaaaagccgaagcatgaagtgatttctttacccaaagaggaaacggttgatccaaatcaaaaagtcattgcgcttactttcgacgacggcccgaatcctgcgacaacaaatcagattctagactccttgaagaaatataagggtcatgccacgttttttgttttggggagcagggttcaatattatccggaaacgctaataagaatgctgaaagaaggaaatgaggtggggaaccattcatggagccatccgcttctcacaaggctttcagtgaaagaagcgttaaagcagatcaatgatacgcaagacatcattgaaaaaataagcggataccgtccgacgcttgtaagacccccatacggcggcattaatgatgaactgcggagtcaaatgaaaatggatgttgcgttatgggatgttgacccggaagattggaaagaccgtaacaaaaaaacaattgttgaccgtgtcatgaatcaggcgggagatggaagaaccattttgattcacgatatttaccgcacctctgctgatgcggccgatgaaattatgaaaaagctcaccgatcaaggctatcaattggtgacagtttctcagcttgaagaggttaaaaaacaaagagaagcgaaataaattaaaaaaggctgtccgtacggacagccttttttctatttaataagagcctgtggtggcccaaacatttaagtttggtcctgaatacttgccaaaagcgtaagaagtccttggatctaaatcatataccatcggtgtatagcaagacttttggccggccaccgcttttccattgccgcctgcagaatcacaattatatctctttccgtccgtgtttcgggtaatctccgcatttgcttcaaagccagacgtcaatgtattattcatcgtgatttttgcccaagccgttttacatgtactgctgaatttaagctcgactactccgatgacttgattgctggcattcactaagtttgaggatttttttgtagagccgctggacgcacaatcattgtaataagggctttttccatcgtaggcatgggtttccgcattggcgggtacacctttgacggcaaaaacaaatactactgcaaataacaccaatgaagccttcgtaaacagtcttttcatatcctttatgacctccttaatatggcaaacaataaatcatacggaggaacaatcaaaacatgcatgcttttttgtgaacaataaaggcggccgggaggatggagttcttggccgcctttgatgtgaggttaaacttttacatcaatggtttgtccgagagtcggatgctgaatcatctttaaggtttgatcggcattttgctgggcggtatccagcatttttttcgttaaagcgatattaacattctgggcaagggatgcttgatgcattgcaaccgataaagcaggaatatccatcgttccacctcctatgccttacctatcggcggctttgtatcattttacagtgaaaaatggcttaattttcgctgttgacccctacgctgcggcatatcgtatgtttttgacaaggagggaatcaggatgaatcttgtcatggaaaagacctttgagcaatacgaaaagctgttttcaatggaagaacagaaaagagaagatgaatttcggtatacgatgatgaggccgtttgaaaagatgtggaccgccatccatgttccgctgaaagcgaaggagccaaacggctatgatgtgatcatggctgcgaaaatgcttggctatttggatgtccgtgatgttgaaatcggacagaaagcactgcgaatactgaaagaatcacatgtttcagagactgcggaatctgcacttcggcaatgcatattttttgatgagcgcgaacagctgcgggtgaatgcaaaggagatcaaattcggcctttatatcgctgatccaaataagcttcagctgcaaaaaggctactgcgggtttggcgggataccgggctttattcatgtatggattgatccgaaccgttataacctgccaaggattccttccattattgctcatgagtttcatcataatttgcggttttcgtatatagattttcatcatggctctgtaagtgtcggggattatcttgtgattgaaggattggcggaatcattcgccagagagctgtttggtacggaacgattgggcccttgggtaactcgttttgatcatgaggatttgcaatattccattgatgtgattaatgaggtgttggatgtgaaaggattttcggaagtcagccgttatatgtttggtgatccaattgctaaagacaaaggatttgaacctgtaggtttatcggcttttgcgggttatgcagttggctatcatgccgttcagtcatttatgaatcaacatcatatcacgataagcgaggccacacgtttggatgcgaaggccattctttctcagtgcggattgttttccaaatgaaaaaaagcgtcacatacagcggcgctttttgattcccaaaaccagcagttctatggcggcacaggcggcaattccgattgtatatgcttcgatatcgctccataaaaaaccgtaccctagtacaagcccgccaagagaagtatctctaatctggtcgatccattcggcatgatagagctggctgaattcaatgacaaaacagaaagaaagactgataatgcccgttatcattgtcttcagcttccgaaatagaaatccgcatcccgtgaagatcatggcggcccacaacgagtctcccagataagtattgagggtatcaggaagaacactggagaatgctctggatccaagccccagcccaatgatcagtatggtgaaaactgcatatatccaacgatttcgcttcattgcgaattgataccccgtctctgcttcatctccctgtattgtaaggaatatagcttttatttgtccactaaaaaagcggctgaatagccgcgtagggtgtttattttgcttttaggtttacatggtcggctgtctgatccgtgcctattacaaaatggagttcatagcggcctgtatcatatacataatcgatttcatcggtaaacgggacggttaacacccgatttgctggtcctaattgcttctgcagcacttccggcgtaactccgcctaaattcagctgccgttccacaccggttccaaagtatcggatttctgaaattgtcatgtctttatgataggaaaatccgtagcccggctgtcccatattccagtgatataaatcaaatcgattgtctcccccgactggtctttccggttccccaaacgcagcgtggacatccccttttgtgcttttgttaatggtaaggccttgcgcctgctgaggcatttctcctttgtaggcggtgttgtaaaggtttttgacgagctcggaggctgattgggttgtattttcatagagtgtatttgtttgagctgcggcctttgccggtgctgaaaaggacgcagccccaaagccggtaaaacagcttgttactgctgctgccgcggttatagcagacattgtctttttcatgttaatccctcctaattgatctaccattccgtttccccgtgtttttgcaacgaaacatgtgagtgcgctttgtatgttttattgagttgttgtaagggaactgaaataggtaattcggtatataaagcaagaaaggggaatggagatgcctggcaagaaaaaaatcacaataaacggcgttgaaatggaagcgtccgaggaacagacggtgctgcagcttttgaataacagctcgattgaagtgccgcaagtttgctatcatccaagcttagggccgattgagacatgtgatacgtgcatcgtcagcatcaatggtgagctgaagaggtcgtgctccgctgaattaaaggatggggatatcattgatacgctctcacctgacgtgaaaaaagcgcaggtcatcgggatggacaagattttatataatcatgagctttattgtacagtttgcgattacaacaatgggggatgcgaaatacataatacggtgaaggaaatgaaaatcaatcaccaaagcattccgtttgatcacaagccataccataaggatgaatcccatccgttttatcggtatgatccagatcaatgtattttgtgcggacgctgtgttgaggcatgccaggacgttcaggtaactgaaacgctgaccattgactgggagcggaaacgcccgcgcgtcatttgggataacgacgtgccgatcaatgagtcgtcatgtgtgtcatgcggccattgttcaacggtctgtccgtgcaacgcgatgatggaaaaaggaatggaaggggaagccggatatttaacaggcatcaataacgaaacgctgcgaccgatgattgagatcacgaaaggcgtagagacaggctacggctcgattctcgccatttctgatatggaatcggccatgcgtgatgaacgaatcaaaaaaacgaaaaccgtctgcacgtattgcggcgtcggctgcagctttgatgtctggacaaagggcagagacattctgaaagtagagccgcaggaggaagcgccagccaacggcatttctacttgtgtgaaaggcaagttcggctgggatttcgtcaacagcgaagaacgcctgacaaagccgctgatccgggaaggcgatcatttccgtgaagcagagtgggaggaggtgttatcgctgatcgccagcaagttcactgaattaaaagaggcgtttggcccggattctctcgcttttattacatcttctaaatgtacaaatgaagaatcctatcttatgcaaaagctggccagaggggtcattggcacaaataatgtggacaactgctcccgctattgccaatctcctgcgactgccggcctgttccggacagtcggctatggcggtgattcaggatcaattacagatatcgcgcaagcggaccttgttttgattatcggttcgaacacgtctgagtcgcatccagtcttatccactcgcattaaacgggctcataagctgagagggcagaaagtgatcgtcgcggatatcagaaaacacgaaatggcagaacgctccgatttatttgtccagccgcgtgccggatcggatatcgtctggctgaatgcgatcgccaaatatttaatagaaaacggcaaggccgatgaacgatttttgagagaaagagtgaacggacggcatgaatatgtaaaaagcctcgcgccgtacacacttgaatatgctgaggagaaaaccgggattgatcaagaaacccttatccaaatggcagagatgatcgggcaagctgacagtgtgtgcgcattgtgggcgatgggcgtgacacagcatattggaggaagcgacacgagcacggcgatctctaatctgctgcttgtgacaggaaactacggaaaaccgggagcaggttcttacccattgcgcggccataacaacgtgcagggagcaagtgactttgggagtatgcctgacagactaccgggctatgaaaaagtgacggacgaacaagtccgccaaaaatacgagcgggcatggggcgtaccgctgccgaaggagccgggtatgaccaaccacgaaatgattgaaaaaatccattccggacagttgaaagcgatgtatgtaaaaggtgaagaaatgggccttgtcgactccaatatcaatcatgtacacgctgcatatgaaaagcttgatttctttgtggtgcaggacattttcctttcacgtacagcggagtttgctgatgtggttcttcctgcgagcccaagccttgaaaaagaaggaacgtttacaaacacagaacgccggattcagcgtttgtatcaggtatttgaaccgctgggtgaatcaaagccggattggcagattattatggaggttgccaataagcttggcgccgactggctctatgagcatcctgcagacattatggaggaagcagccaagctgtcgccgatttatgccggtgtcacctatgaacgtcttgagggctataattccctgcaatggcctgtaaacgctgatggaaaggattcgcctttactctttacagagcgcttccctttcccggacggcaaggccattctctaccctgtccagtggacagagcctaaggaattcggtgaggaatatgatatccatgtcaacaatgggcggctcttggagcacttccacgaagggaacctgacttacaaatcaaaagggatttcggagaaaacaccggaagtgttcttagaaatttctcctgagcttgcggcagaacgagggattcaggacggaaccctcgtcagactcacatcgcctttcggaaatgtcaaagtgaagtgcctgattactgatcgagtcaaagggaaggaagtatatctgccaatgaacgattcaggggaagcggcgatcaacctgttaacaggcagccatgccgataaggataccgatacgcctgcttacaaagaaacatcggccaagatggaaattttgaagcacgacggaatcagcccgctgcctaagatcaaccaccgcaacggcaatccgcagccgcaaatcggtgtgcaggttcataagaaatgggcgcggaaggattatattttccctggtgacgctgtgaaaagggggatgggccataatggctaaagcgattaaacgaatccaaaaaatcgaggtaacagaagaggatcagcgaaagcgtgatttgcgggaaattgaagatgctctaattgaccacaaagaagcgattctcgaaacattgcatatgctgggccatatgaacgagcgcggtgtcctgccgttgctccgcggcctttttggccaaggggataaagttcttgatatcctggtgaaaaaggcagatacagaggaaacagccaatacgctgaaaaatctgcttcttctgtttggaacactcggcatgctggacgtgaagcagctggagcctctcattttgaaagtgaatgcgggtgtggcaagcgctgtagagcagaaaaacagtgaagaaaagacaggttattttgatattatccgctcgctaaaagacccggaaatcaacaaatcaattacactgctcttttcctttttaaaaggaatgggacaagatacaaaggagctggaacgcacgacgcagcctccggaacaccaaaaacatcatcaggaacctcgagagaaaagaggaatgaataagcgagattgacctcccacccgagcggcttcagccagctcgggttttttgatgaaaaggtctaatggactagtaaaaaatattcaaatactaggaagaagtaagattgtgatgaatgagatagaaataatcgttactttcttacctgttaagaaaaggaaaaatctgattataatagaaatcgattactttagatgggggaacaatcatgaaaaaagtcttattactattatttgtcttgacgatcgggttagcgctttctgcgtgcagccaatcgagcgatgcgtcagagaaggaaaaaccgaaagagaaaaaatcgcaagaagagcttgaaaaggaacttgataaggaattgaaaaaaggcggtgagccgaagaccaaaaaagatgatcaaatacataaaataggagaaacatttaaagcaggacatacgaattttacagtgaataaagttgatagagtgcaaaaaggtgaatatatgaatgttggcggagctgtaaatgaggagacaaaaacaataaaagatgatgaggaacggcttattatagaagttacgatggaaaatataggggaagattcaataagctacaattttatcgggtttgatttaagagataagaatgatcaatcagtgcggcctgttttttctatagaagagaagggcagaatccttatgggaggaacactagtatcggggaaaaaggttacaggtgtactcagttatgtcatccctaaaggagaacagaaacattacacactggtatataatccgtttttagctgatacaaatagcagtaatacagaagagagagtaaaggacgatattgattacttggtgaagttagattagaagctaatttacagttgcacgtttttcatctgtggaaaacgtgcattttttatagcgaaacttgacttgaaaggatgagtgataaaagtgcaaaccaaatggctggaacgggcacagcgaattcgggcgatcgcacaggctgggcttgctttttccaaggatgtgtacgacagggagaggtacgaagagctaatgaagcttagcacggaaatgatggcggattactcggagaaggacattgaagttatcactgatttatggcaaggcgagaagggctatccgacaccgaaagcggatgttcgcggcgcagtattccgagagaatcagattttgcttgtccgggagaagcatgatgagctgtggtcgctgccgggtggattttgcgagattggtttatcgccagctgaaaacgtcgtcaaggagatcaaagaagagtcggggtacgatacagagccgtctcgattgctggccgtgctagacagccataaacactctcatccccctcagccttatcactattataaaatcttcatcgcatgcagcatgacgggcgggcagggggaaacaggggtcgagacgaatcatgccgctttttttccggaagacagactcccgccgctctctcctaaacgaaacacaccctcacagcttagcatgctgtttgactttttgcgccatccggacaagaaaacgatatttgactaaaaaagaaagagcctatgggctctttcttttttataatgtaatgtgtttttcgttggcgagtttcagaagggtcaaaatagaatcggcttgtttatggccgagtttttgctttaatttgttttcttcaactaatcggctgccataaattttgacagaggctttgtcgacgacagtatgccagttttcctgtttttttccctcaacaagcggtttttcatgtctctcagaaaaagagaacacaaacagtacgaatgcaagtgaaagtaggatgccgacaacttgttttttgtaatcagtctgtgctgccacgttgttctctccttcaccttttaccttctatttaatcatagaatcagcttattttacataatgggaaagtcatttttggagttagtgcatttggttgaaaacagaggcgttttttgagcggagcggtgcaattgaatctatattggctttgcgtgcttatgcctaaggtcacgttgtgaaccaaaacagcagtgcagaatagaaaaaaattgaaagattatggtaagatgaacgaaattcgagggggaatatatgatgcctgcatcaaacatcgtgatcgcctgcctgctgttatcaatttaattatttgtggtagtccctctctttttcgaaagcgggaggtgaagtggaacattaattgctgaattctttcaaggggagtgaccgtacatgaatgtgttaaaccgccggcaagccttgcagcgagcgctgctcaatgggaaaaacaaacaggatgcgtatcatccgtttccatggtacgaatcgatgagaaaggatgcgcctgtttcctttgatgaagaaaatcaagtgtggagcgtttttctttatgatgatgtcaaaaaagttgttggggataaagagctgttttccagttacatgccgcagcagacaagctctattggaaattccatcattaacatggacccgccgaagcatacaaaaatccgttcagtcgtgaataaagcctttactccgcgcgtgatgaagcaatgggaaccgagaattcaagaaatcacagatgaactgattcaaaaatgtcaggggcgcagtgagtttgaccttgttcacgatttttcatacccgcttccggttattgtgatatctgagctgctaggagtgccttcagcgcatatggatcagtttaaagcatggtctgatcttctggtcagtacaccgaaggataaaagtgaagaagctgaaaaagcctttttggaagaacgagataagtgtgaggaagaactggctgcgttttttgccggcatcatagaagaaaagcgaaacaaaccggcacaggatattatttctattttagtgaaagcggaagaaacaggcgagaagctgtccggtgaagagctgattccgttttgcacgctgctgctggtggccggaaatgaaaccactacaaacctgatttcaaatgcgatgtacagcatattagaaacgccaggcgtttacgaggaactgcgcagccatcctgaactgatgcctcaggcagtcgaggaagccttacgtttcagagcgcccgccccggttttgagacgcattgccaagcgggatacggaaatcggggggcacctgattaaagaaggtgatatggttttggcgtttgtggcatcggcaaatcgtgatgaagtgaagtttgacaggccgcacatgtttgatatccgccgccatcccaatccgcatattgcgtttggccatggcatccatttttgccttggggctccgcttgcccgtcttgaagcaaatatcgcgttaacgtctttgatttctgcttttcctcaaatggagtgcgtcagtatcactccgattgaaaacagtgtgatatacggattaaagagcttccgtgtgaaaatgtaatagataaggagactggagattcatgaaaaagtaccatatttcgatgatcaatatcccggcgtacggacatgtcaatcctacgcttgctttagtagagaagctttgtgagaaagggcaccgtgtcacgtacgcgacgactgaggagtttgcgcccgctgttcagcaagccggtggagaagcattgatctatcatacatccttgaatattgatcctaagcaaatcagggagatgatggaaaagaatgacgcgcccctcagccttttgaaagaatcactcagcattctgccgcagcttgaggagttatataagggtgatcagcctgatctgatcatctatgactttgttgcgctggctggtaaattgtttgctgaaaagcttaatgttccggtcattaagctctgttcgtcatatgcccaaaatgaatcctttcagttaggaaatgaagacatgctgaagaaaataaaagaagcagaggctgaatttaaagcctacttggagcaagagaagttgccggctgtttcatttgaacagttagctgtgccggaagcattaaatattgtctttatgccgaagtcttttcagattcagcatgagacgttcgatgaccgtttctgttttgtcggcccctctctcggagaacgaaaggaacaagaaggcctgttgattgacaaggatgatcgcccgcttatgctgatttctttgggtacggcgtttaacgcatggccggaattttacaagatgtgcatcaaggcatttcgggattcttcatggcaagtgatcatgtcggttgggaaaacgattgatccagaaagcttggaggatattcctgctaactttactattcgccaaagtgtgccgcagcttgaggtgttagagaaagctgatttgttcatctctcatagcgggatgaacagtacgatggaagcgatgaacgcaggtgtgccgcttgtcgtcattccgcaaatgtatgagcaagagctcactgcaaatcgggttgatgaattaggccttggcgtttatttgccgaaagaggaagtgactgtttccagcctgcaggaagcggttcaggctgtatccagtgatcaagagctgctcacccgcgtcaagaatatgcaaaaggatgtaaaagaagctggcggagcggagcgtgcggcagctgagattgaagcgtttatgaaaaaatccgctgtcccccagtaaaaacataaaaaccgaaatcaatttgatttcggttttctgtttaaatattttttttcatcccgcatctccggcattctctaagaaattttccgccttttacagagcttttgaacagtgtgtaatcacagttgtcgcagcgcccgctgcgggcgtccggatattcattgaattcgtaaacgatcgatgtatcgtagccttttgtttcatattcttctttttttgtttccatgtcgtccctccgttacaagacgtgtctgctgtttatcttacagcaagcttccggcgtattcaatggattttagaggtttgggtttatcttgatttctcccttggtttgcgccaaaatagctttaataagcttgtatacataaaaagcctatgcaaagaggagaggaaacgggtatgggaaaagggttacttggaaaacgtgtggcaatcggtggctcacgaaaaacggaagaaatcagtacaatcattgaaaaacagggcggaatacctgtcatccggcctctccaaggtacagtttacttagcagagaagcaggtggagccggatttgcggacgtttgcggaagaaaaagctgactgggtcattttcacgacaggcatcgggttggagactcttgtcgatatggcagagaaaattggactgaaagatgaatttctgcaggccattcgccaagcgaaagcggcatgccggggatacaaaacgctgtctgcgctgaaaaagcttgggatcacaccggaagcttcggatgaagacgggacaacaagaggcttaatccgttctttggagcctcacgacttttcaggaaaaacagtcatggtgcagcttcatggcgaaaaagcgccggctctcatggcatttcttgaagaaaaaggcgcgtctgtcctgccgattctgccttatcagcacatcccgccggaggaggaaacggtggagcggttatgccgagagctgatgaaccgtgagatcgatgccgtttgttttacaacggccattcaggttcgttccctgtttgattttgccaaggggcgaggttatatcaatgaagtgaagaaggtattcgaagaacgcgccatcgcagctgctgtcggaaaagtgactgctgaagcactgcgggaagagggcattacgagactgcttgcgccagagattgagcggatgggtgcgatgattgttgagctggccaagtattatgaagaaaaggaataacaagtacaaaaagccgcttttccctcggaaagcggcttttgtctgtcattcattctgcttcagctgctgatgaacggtgaataatgatgggtatgtcagcacgcttaagattacacaagtcagcgcggctgaggccatcgttgtaaacacgattaagagttgaaagcgtactgcctgaatcgggtccgcgccggctagaatctggcctgtcatcatgccgggaagctgaacaagacccagtgttttctggctttcgagcgtcgggatcatactcattttcatcgctgaagtaagaatgcgctgtatggattgcttcggtgtgccgccaagtgacaatattaattgaatttcttctttgcgaacgccgacttctgagttaagccggtttagaaacaaacttgagagcaccatcgaatttccgatgaccatcccgctgatcggaatgacatatcgtgccgtaagcggaatgatatgaagagacagcagaattccctgcgtcaccatttctacgattgctaacgcggcaaacaccctccaaaacgaaccgattgtatttttctttcgcttgatgacattttgcgccgccaccgcgagcattaacagcaccatcagcaggataaaaacagggtggtctccgcgaaaaatcagcgacaaaacataaccgatgataagcagctgcaccgcggaccggatggtggcgatgatcatgtctttttctaccccggctttaaaggattttgataaaaacaaggcgatcaaaacaaagatcatcgttaaagagagagaaaggtaatccattaccgagtgcctcccttcaaaaattctttcgctgcttcatgctgcggagcggagaaaaatgtttcggtttcggcgatttcaagcagccggccatctgccataaaccaaatggtatcggctactcgttttgcctgctccatattatgagtgacccacatgactgtccattttttctcttgatgctgacgtttgatcagttcttcaatctcaagagcagaaaccgggtccaaggccgacgtgatttcgtccaacaatagaatggaggaaggatttgagagcgttctggccagtgacagtctttgccgctgcccgcccgataagtctctggcgcttctgtctaacagctctggcggcagccctgcaagagaagccagcttttcaggagagtacagctgggattgatgcagcctttgtacaagacttaaattgtcacgcactgtcccgtcgagcacgggagccgattgaaacgcgagggctgccgttctcctcagctcattgacattccattctctgacttcctttccatatatgttgacttcgccgctgtcaggcgttctcattaaattacacatagaaaggagggtgcttttgcctgagccggaagggcctaaaacggctacgattgcaccctgttgaatgtctccggtgacatcctgcagcacatcataggtttgtccatcttgtttatagctttttctgactgatctgaaggagatggctggtatgttttgtgtttgatcgtttgcttccattacaataatcacctttcaatataagtaggctgacattatatttaactataacgtgaaacagattccttttggtagcacaaataaaggagaacaggctttcacccattctcctgcagatgctacgcagtcagatttgactgtgctttctttttcggttttctcggctgtgaagcgaaggtatgtaacatcatccccgctattataatgaacaaaccggcaaatgataatagagatgggaaaacgcctgacagcagaacaatttcaccaagcagcgcgaaaatcacttcaccggattgagtggcttcaacagctgcgagtttttgcggattgtctcttaccatatcagtagcccagaaaaataaaaccgtcgcaatgatgcctgagctgacggcaacgataaaggattgaacggtttgacttgctgttggaaggccatctgaccaccagccgtaagctgctaatataagccagaatggaaggcttgccaatgtcattccaagcacgcgctgaaatgtatcaagccggcctccgtattcttcgagcattctcctgtttcctaacggataggcaaaagccgcaatgacaaccggcagcacactgaaaagcagcatcctcccagaaagcgattctgcatgctgaagctgaatcagagccgctccaatcaggatgatcacggaagtgccaagtgaaaccaggggaatcttttggcgaacgagctgcggaccgcccggcatatcttgtttgacataaaacaaaggagataagagcaccccggctacaattgtaatttgccaggttccggctatgagccaccccggaccgtatgcagccgcaaatgtaatcggcgcgtaaaaaagcacgaaaccgacgaagctccatttgatccaataaaacggctttttcctcatctctagtaagagaggcgtgaatgtccctctcatgatgacaatcaaacataaaaatggcaccataaaaataaagcgcagcgaagagctccaaagccagctgcctcctgataactccatcgctctgtttaatataaaggtaacggcgaaaaagagtgaagccaatattccgataacgatagctttcatgatatccctcattctggcattatttttttatactatactattcggtatcatgcagatcaatggaatcatgagaaaaacatcatgtttggcgaactgctatgtgtggaagacaaaaaagggaggtgaaattgatggaaaaagagacacagacatacttctttccggatgacggcaggattccgaatcaccctgattttccgctcgtggtgtatcaaaacgcgcttaaggacactggactggcagagcggatcgtcatccggcatggctggtcaaacagctggtcagggagtgtttttccataccatcattatcacagcaatacgcatgaagtcctgattgcccttaggggagaggctgtgattcagtttgggggagaaaaaggggctgccatccctttcaaatcaggcgacgcagtcgtgattccagccggagtcggacataaaaagctcagctcaagccccgattttactgtccttggcgcctatcccggtggcattcagtatgatatgaagacgggaaagcccaatgagcgagaggaagcggtcaaacagattaagcaggcggcgttgccggcgaatgatccgatcacaggaaaaagagagcctctattggaaatatgggtaaagtgaaggggagaaattgctggattgtcaataactagtgccgcagaaacgatatgacatgtgctccatataaattaatttcataatcgaagcaattcacgttcaaattttgttcaaaaagtgttatcatatagaaggtaatcgaattggagttttttgtgtttgctattttcagagagagtaaaggattttgacttattcaattgtttatttttagataaaaataatactgaatatggcaagatgaaaaactgggtagtaaacatttatttttgtaaatgattgtgcacgaattcacaatccttattcttatgccttaaaagcgtgagacagggagaggcactaccctttccaaaaaaatcagcaaactgcttatagtaaaggagaattggatatgccagaaacaatcgatcaaacaaatgcgtctgtcagccaaagccagcaagatcttattgatcagctattaaagccagaagttcaagaatcattgactgttttagttgaccagcttccgaagctgactgagttagtcaatattttaacgaagtcttatgatttcgctcagtctgtagcgactgacgaagtgttaaaaaacgacacagtcggtgcgatcactgaaattcttgagcctgtaaaagaaacagcgaaagaagtagctgcgactgcgatcgaagcaaaagaccgcgcggaagcaagcaacgaaacaattggtcttttcggcctgctgcgtatgctgaaagatcctcaagctcaaaagttgttccgttttgctaacagctaccttgaagtcatgaacgaacgcgaaaaccaaaaataatctcagattcaaattgatataaaggacggaggatatacgatgtcaaaacatattgtcattctaggcgctggttatggcggagttctttctgctctaacagttcgcaaacattacacaaaagaacaagcacgcgtgacagtggtaaacaaatacccaactcaccaaatcattacggaattacaccgccttgctgcaggcaacgtgtctgaaaaagcggttgcaatgccattagaaaaacttttcaaaggcaaagacattgatcttaaaattgcggaagtaagctctttctctgttgataaaaaagaagttgcgcttgctgacggttctacattaacttacgatgcgcttgttgtaggtcttggttctgtaacggcttacttcggcatcccaggtcttgaagaaaacagcatggtattgaaatctgctgccgatgcgaacaaagtctttcaacatgttgaagatcgtgtgcgcgagtactctaaaacgaaaaacgaagcagatgcaacaatccttatcggcggcggcggcttaacaggtgttgagcttgttggtgagcttgctgacatcatgccgaaccttgcgaaaaaatacggcgtagaccataaagaaatcaaattaaaacttgttgaagcaggtccgaagatccttcctgttcttccggatgatcttatcgagcgtgcgactgcaagccttgaaaaacgcggcgttgagttcttaacaggtcttcctgttacaaatgtagaaggaaacgtaatcgatctgaaagacggatctaaagttgttgccaacacatttgtttggactggcggcgtacagggtaacccattagtcggtgaatcaggtctagaagtgaaccgcggacgcgcgactgtaaatgacttcctgcaatctacatctcatgaagatgtattcgttgctggagacagcgcagtttacttcggtccagacggccgtccatacccgccaactgcacaaatcgcatggcaaatgggtgagctgatcggttacaacctattcgcttacctggaaggcaaaacgcttgaaacattcaagccagtaaactctggtacacttgcaagccttggacgcaaagacgcggttgccatcattggtgctaattctacaccgcttaaaggtcttcctgcttccttgatgaaagaagcaagtaacgtacgttacttaacacacattaaaggacttttcagcctggcttactaatccttttaatgaatctgacattgccaaaagcgttccttaccgagtgctttctggcaatgtctttttttatgtttatgacagcgttaacatttcattttcaaaaaagagattgatcccagaggaatataaaggtaaaataaaaacaaatcaaaatgttaacgttaacattttgaaatagaatgaaagacggtgaggacatggaacccttcatgggcgaaacctttttattgaaaaatgaaaccgctgtcagcctctatcacaattatgcgaaagacatgccaattattgattaccactgccacttaagtccgaaagaaatctatgaaaataagacatttcaaaacatcacggaagcctggctgtatggtgaccattataaatggcgcatcatgagagccaatggaattgaggagacatacattaccggagatgcgcctgatgaggagaaatttatggcttgggcgaaaaccgtgccgatggcgattggcaacccgctctacaactggactcacttagaattgcagcgtttttttggcatttacgagattttaaacgagaagtccgggccggctatatggaaacggacaaatgaactgctcaaaggggaaggcttcggggcaagggatttaatcgtgaaatcaaatgtaaaggttgtgtgcaccacagatgaccctgttgattctcttgaataccatctattattaagagaagacaaagactttcctgtcagcgtgctgcctggatttcggccggataaagggcttgagatcaatcgtgaaggctttcctgagtgggtgcaggcgcttgaagatgccgccgccatatccattgcaacctatgatgagtttttaaaggcgttggaaaaacgagtgcgattcttccactcagccggcggcagagtttctgatcacgcgatagattcaatggtatttgccgaaacaacaaaagaagaagctggacggattttttctgacagattacaaggaacagaggtttcttatgaagatgagaagaaatttaagacatatacgcttcagtttctttgcggtttgtatgcggagctcgattgggcgatgcagtttcatatcaacgctttaagaaacacgaatacaaaaatgatgaaaaggcttggacctgatacaggctatgattcaatgaacgatgaagaaattgccaagcctttatacaagctgctgaactcagttgagatgaagaaccagctgccgaaaacgattttatattcactgaatccaaatgataactatgtcatcgccagcatgatcaacagttttcaggacggtattaccccgggaaaaatacaattcggcacagcctggtggtttaacgatactaaagacgggatgctcgatcaaatgaaagcgttatcaaatgttggccttttcagccgttttatcggcatgctcaccgattccagaagctttctttcgtatacgcgccacgaatatttcaggcggatcgtctgcaatttgattggggaatgggtggaaaacggcgaagtgccgcgcgatatggagcttctgggaagcatcgttcaggggatttgctatgacaatgcgaaacactactttcaatttcaagaagagaaagcaaacgtgtaacaaagtgtccgctcagtatcgctgagcggatcactatccgaaaattcttaagacacagaggtggaacatgcgaactgaactggcaaataaggttgtgtcggtcgaaacggaaaaaaggctttcattgaaagagaaaatgtcctatggttttggtgattttggcaatggttttatgtttgatctcggccagatttatttattgaagtatttcactgatgtagcgggaatccccgctgcgatggccggcggcatttttttagtcagtaagctgtttgcggcgataacagatccaattgtcggctcatcaatcgattatcgcaaaaacatcggcaaacgggggaaattcaggccttatctattaatcggcagcctcgtgcttgcggtgcttactgttcttatttttctgtctcccaatgtatcaacgactggaaaactgatttatgcatatgcatcctatatgatttggggcatcggctattcgtttgtgaatattccgtacggctcattaggggcagcgatgactcaaaattctgaggaacggacctccatttcgacgttccgccaaatcggatcacttggcgccttgtttatcacaagtgttgccgtgatgccgctgctcatcaagtttgataatccgaaggtcggctacccggtggtcatgggcttgttcgccgcactcggtgtgctttggttttatatttgctaccgcaactgcaaagagcgcattgtcatatcggaagcacccaaagaaaaattaacactctcatctgtcgtcaaaacatttattacaaataaaccgctgttaacccttgtcctgatgacgattttttcaatttccgcatacaacattaaatccgccatgctcgtctatttcgcacaatataacctgggcaatgttgaattaatggcttatatgaactttataattatcggttcttcctttttgggcgtcgtattccttccaaagctcgtcaagatgtttggaaagaaacgaacggcaatgatcggcttcggcatcagtgtggccgcggatctgatcaactttatgcttccatctaacgtttatgtgtttacaattctcgccagtatcgcctttattggaatcagtatcccaaatggcatcacgtgggctcttgtctccgatattatcgactatggcgaatggaaatccggtgaacggaaggaagcaacgacatattcacttttcaatttctccagaaagcttgctcaatctttgtctggctttctctcggggatcggtttggggattatcggctatgttccgaatgcagtccagacagcacaggcgctgattggcatcaaagcgctgcttcttctgtatccggccattgctttggcattagcgatgatcattatcagctttctttataaactcacagaccagcagcatgctcagatcgttcaggatcttcatcaaaagaactgacaatataatataaagaatatttaaaataatttgtaaataaaatgtgtttgtaggggtttcgctaggggagtgcccaaaaaactgaaaaggaaggaggcacttgtttgaaaacgataacaattgcagctaaagaagcaaaggaactcgttcggcaaaagctggccagtgccggtttgaatgaacgagatgctgaaaaagtagcagatgttctcgtgcacgctgatttgcgcaatgtacattcgcatggcgtgctgcgcacagaacactatgtaaacaggcttttagcgggagggatcaatcctggggcacagcctgtttttaaagaaacggggcctgtgaccggggtgcttgacggagacgatggtttcggtcatgtgaattgcgacatggcgatggaccatgcaattgacatggcgaagaaaaaaggagtcggcatggtcacggccgtaaacagcagccattgcggagcgctaagctattttgtgcaaaaagcggctgacgaaaagctgatcggaatagcaatgacgcatacagacagtatcgttgtcccgtttggggggaggactccttttttagggacaaatccgattgcttacggtgttccggctaagcataaaaaaccgtttatcctagatatggcgacatccaaagtggcttttgggaagattctgcaggcccgtgaagagggcaaagaaattcctgaaggatggggagtcgatgaaaacggagaagcagtaactgatcctgacaaggtcgtctcactttcaacattcgggggcccgaaaggctatggactatcgattgtggtggatgtattttcaggattgctggcgggcgcggcttttggccctcatattgccaaaatgtacagcggtcttgatcaaaaaagaaagctggggcattacgtttgcgcgatcaatccagccttttttactgactgggatacgtttttagagcagatggatgccatgattgatgaactgcagcaatcaccgccggctgttggattcgaaagagtgtatgtgcccggcgagatcgagcagctgcatgaagaaagaaataagaaaaacggaatttctatcgcccggagcgtgtatgaattcttaaaaagcaggtgagaaaaatgaaagcggttcaagtgcgaaaagcgtatgatctggtgacagtggaggtgaagaagccagttctttcaaaggatgatgaagtgctcgtgaaagtcaagcgagtcggcatttgcggttcagacatgcacatttatcatggaacgaatccgctcgctaccctcccgagagtcatcggacacgaggtaacgggacaagtgaaggaagttggtgcgaaagtacagagcctaaaacccggtgatcatgtggtaattgagccgatttcttattgcggatcgtgctatgcctgccgcaaagggcggccgaatgtttgcgccaagctttctgtatttggcgtacatgaggacggaggcatgcgggaatatattgtgcttccggaaaggcagcttcacgcggtctcaaaggacttgccttgggaggaagcagtcatggccgagccttatacgataggcgcccaggcagtgtggagaggccaggtggaaaaaggtgataccgtcctgatccagggagcggggcccatcgggatctgtgtgttgaaaatggcaaagctggcgggtgctgttgtcatgatgactgacttgaacgatgagcggctggcatttgcgaaagaaaacggcgccgatgctgttgtaaatgtccaagcagaacatgttgccaagcgggtccttgaatggactgggaatgaaggagcaaacgtggtcattgatgctgtttgcctgccggagacttttgcgctttcaattgaggctgtgtcaccggcgggacatgtggttgtgcttggatttgatgaaagagcggctcagatttctcagctgccaattacaaaaaaagaagtcacgataaccggatcgcgattgcagaccaatcagtttccaaaagtggtagagcttttgaatggaggccggttagtgcataacgggctggtgacccatacattttcagttgatgacgttcatcatgcatttcagtttattaaggagcatccagatcaggtgcgaaaagccgtcatcacgtttgattaaatgactgaatccggaggtgcgagcatgaatatgacattccgatggtatggaagaggcaacgatacagtcacacttgaacacgtgaagcaaattcccggtgtcaaaggcatcgtttgggctctccatcaaaagcctgtcggcgacgtgtgggaaaaagaagaaatcagagccgagaccgaatatattcaatcctatggttttcatgctgaagttgtagaaagcgtgaatgttcacgaagcaattaaacttgggaacgaagaacgcggccggtatattgaaaactacaagcaaacgatccgcaaccttgccggatttggcgtgaaagtgatttgctataattttatgccggtttttgactggacacgcacggacatgttccggccgctagaagatggatcgaccgctctgttttttgaaaaggccaaggtggaaagccttgatcctcaagagctgattcggacggtggaggatgcatctgacatgacactgccggggtgggagcccgaaaaattagctcggatcaaagagctttttgctgcctacagaacggtcgatgaagaaaagctatgggacaatttatcattctttttgcaggaaattcttcctgttgctgaggcctatggtgttcaaatggccattcatccggatgacccgccgtggccgattttcggactgccgcgcattatcacaggagaggcaagctataagaaactgcgggcgatatcagattcaccgtctaattgtatcaccctttgtacaggttcaatgggagccaatcccgctaacgacatggtggagatcgctaaaacgtatgccggcatcgctccattttcacatattcgcaatgtgaaaatttatgagaatggcgattttattgaaacatctcatttaacaaaggatggttcgatcaacattcaaggcgtgatggaagaactgcataagcaggattacgaaggatatgtcagaccggatcatgggcgccatctttggggcgagcaatgccgcccgggatatggcttatacgatcgggcacttggcatcatgtatttgaacgggctgtgggacgcttatgaagcaatggcaaaaaaagaggtgggcatatgatcccgctgcatgagaacctggctggtaaaacggctgtcatcactggcggcagcggcgtgctttgctctgcgatggcccgggagctagcccgtcatggcatgaaggtggcgattttgaatcggacggctgaaaaaggccaagcggtcgtgaaggagataacggcggctggcggcacagcgtgcgctgttgctgcggatgtgctggacaggatgtcactggagcgggcaaaggaagacatccttggccaatttggcgctgttgatctgttaattaacggggctggcggcaatcatcctgacgcgataaccgatgtggagacatatgaagaagcgggagaaggccaatccttttttgatatggatgagaggggctttctaactgtattctccaccaacttcaccggtgcgtttctggcctcgcaagtgtttggtaaagaactgctgaaggcggattcacccgcgatcatcaacctttcttccatgagtgcttattcacctatgacgaaggttccggcatacagtgctgcgaaagcatccatcaataattttacgatgtggatggctgttcattttgccgaaaccgggctgcgggtcaatgcgattgccccaggcttctttctgacaaaacaaaatcatgatctgctgatcaaccaagacggaacgttcaccagccgatctcacaaaattattgcgggaacaccgatgaagcgcttcggaaaacccgaggatttgctcggtacgcttctttggctggcggatgaatcctattccggttttgtcactgggatcaccgttcctgtcgatggaggatttatggcttattcaggtgtgtaacgaaagcggtgcaacagaaactgaaccaacataggggtgaggttgagatgttttcaaaagataagcttcccgttatcctttttttgttcctggcaggggtgattaattacctggatcgctcggcgctttccattgcagctccttttattcaggatgatctcacattgtctgccacgcaaatgggcttgattttcagcagtttttcgattggttatgcgatttttaactttcttggtggcgtggcatccgaccgctatggggcaaagctgaccttgtttgtcgcgatggttgtttggtcgctgtttagcggagcagtcgccctcgcttttggttttgtcagtctgctgattatacgcattctcttcggaatgggagaaggcccgctttcggcgaccatcaacaagatggtgaacaactggttcccgccgacccagcgggcgtctgttatcggtgtaaccaacagcggcacgccgctcgggggagccatttccggcccgatagtcggcatgatcgcagtggcgttcagctggaaggtatccttcgttctcattatgattattggattgatatgggcagtgctctggttcaagtttgtcaaagaaaagccgcaagagacgattaaggaagcaccggcaataaaagcagaaacgtctcccggagaaaaaattccgctcaccttttacctgaagcaaaaaacggtcctgttcacggcgttcgcttttttcgcttacaactacatcctcttcttctttttgacgtggtttccgagctatcttgtcgacgagcggggattaagtgttgaatcgatgagtgtcattacggtcatcccgtggattttaggctttatcgggctggctgcggggggatttgtttctgactatgtgtacaaaaaaacggcccgaaaaggtgtgctgttctcgcgcaaggttgtgcttgtcacgtgtttgttttcatcagctgtcctgattggatttgccgggcttgtggcaacgactgcgggggctgtcactcttgtcgctctgtcagtgttctttctttatttgaccggtgctatctattgggctgtcattcaagatgtggttgatcaaaacaatgtcggttctgttggcggcttcatgcatttcctcgccaacacggcaggaattatcggcccggctttaaccggatttattgttgaccaaacaggcacgttttctggagcatttttgcttgccggagggctggctgtcttcgcttcacttgctgtgattcgttttgtccgtccaatcatcggcaagccagcgggaacagaagctaagaatcctgtgtcttattaatctggaaatatagtgggagaggcggtatatttgatgatacaatatacagtaaataatcgcagccggtatgataaggaagggaattagatggtaaccataaaagatatcgcaaaactcgcaaacgtatcccacacaaccgtttccagagcactcaacaacagcccttacatcaaagaacatacgaagaaaaaaatattagagctagcagagcagctcaactatacaccaaatgtaaatgcgaaaagtttggcgatgcaaaagtcgcatacgatcgggcttttctttacaagcattacaaacggaacctcacacagcttctttgcagacacaatcaaaggcgtcaatcaagccataagtgaggattacaatctgtatgtgcgcggcattgatgatctgaaaaactatgactccgttacaccgatgagatatgacggcatcattttaatgagccaaagtgacattgataattcttttatttaccatattcgcgaaaaaaacattccgcttgtcgtgctgaatcgtgatattgatgatcgcaccatcacgaatattttgtctaatgacaaggaaggctctcaagaagctgtagaatacttcattcagtccggacatcaagacatcgccatcatcgaggggatcgaaggctttaaatcctcccagcagcgaaaggaaggctacttatctgcactgattcaacatcatattccgatcaagcatgaatacagtgtcaaaggacagtacgatatggaaagcggctttcaagcgatggagcggctgctggcactgccgaatcctccaaccgctgttttttgttcgaatgatgacatggcaatcggagcgatgaatgcgatattcgcaaagggcctgcgcgtccctgatgatatttcggtgatcgggtttgatgatattggtttttcacagtacatcacgccaaggctttcaacagtaaagcgcccagtggagaaaatcagcgtgcttggcgcgcaaaaactcttgtctctgatcagcaagcccgaaacaaaagcagaaaaaatcttggaaaacacagaatttatggtgcgtgattcagtcaggcgattgacgacgtgatgtcccgtttttcagcgggcattctttatacagaaaaatgttaacgtgtgcataaaaggagagggaggcaatacgggtgcagaagctgaataaaaatgtgtacgatcactatactcagtatccagaaaaaattctccagttcggagaaggaaactttcttcggggatttgtcgattggcagattgatcaattgaatcaacacactgattttaatgggagcgtggcagttgtccagccaagaggctcagaaaaaatcaaacgattaaatcagcaagatggattatatacgctttttttacaaggaatgaaagacggagaagcggtaaacgagcatatgattatcaactcaatcagccgggggattgacctgttttctgattatgaagcatacaaagaattggcatcaagcgaaaggcttcggtttattatctccaacaccactgaggctgggattgtatgtgatgaaaaagatcgtttagaggataggccgcaaaaaacattccctgggaaattaactgcatttctctacttccgctatcaggcttttaaaggagatcagacaaaagggtgtgtcctaatcccatgtgaactgattgagaacaacggcgaaaagctgaaggaaacggttcttcattatgcaggtctgtggaagctggaggaaggatttacacagtggattcatgaggccaatacattttgtaatagtttagtagaccggattgttccgggttttcccgtcgacagcattgatgagatcacggcggatcttggctatcaggatgatttgatagttgtgggagagcaatattatttatgggttatcgaggggcctgattggattggaaaagaacttccctttgcggctgcagggctccatacaaagatcgtcagcgacctcaccccataccggactaaaaaagtaagaattttaaatggcgctcatacagcaatgacgccagtggctttattatacggcttgaagactgttagggatgcagtcgagcatccggaagttgggcgatttataagagagctgattgatgacgaaattcttcctgttttaaaaatggaaggtctttctcagtatgctgacgatgtgctgaaccgttttaaaaacccgtatattaagcattacctggaaagcattgcattgaacgccatttccaaattcaaaacgagaaacctgccgacacttaaggaatatgctgaacaaaagggacagcttcctgaacgcttggtgttttctttcagtgctcttctgtatttttatcataataatgagacattgcaggatgatccggcagttcttcaatttttcaaagaggtttggtgtcaggaggatggcgacatgcttcggattgcatcaagagtgttaggcgaacagtggctgtggggggcagatctcaatgagataccgaagctgactgatagagtcgctgtttacttgaatcatattcatgagctgggcatgcagcgggctcttgaacaatactgcatacaagggggagaggtacgttgaagtcgtttataaagattcataagcaagataatgtccttcttgctctgcgggatatccaaaagggagagaggctgcatgcggacagcgtgtcgattgaagtaaaggatgatataaaaagaggccacaagattgcattgaagcctattaaaaaaaatgacagcatcatcaagtacgggtttccaatcggtcatgcatcacaagatatatcgatcggagagcatattcatgtccataatacgaaaacaaacctgtctgatatccaatcatacagctatacaccgagatttgatgaaaatccgtattctaatgagaaccggacgtttaaaggttttagaagagaaaacggagatgcgggtgtacggaatgaattgtggattgtcccaactgtcggctgtgtcaatggaatagcagaaaaaatgctgcagcgttttgtcagagaaacaggggatattgctccatttgataacgtactggtgttaaagcatcaatacggatgctcgcagcttggcgacgatcatgaaaatacgaagcagattctgctgaatgccattcgccatccaaatgccggcggcgtcttggtgttagggcttggctgtgaaaacaatgagctggcaagaatgaaggaagcactgcaagatgtgaacttgaagcgggtgaagtttctggaatcccagtcggtgaccgacgaaatggaggcaggcgttgctttgctgaaggaaattcatgaagcggccaaagaagataagagagaagacattccactgtctgaactgaagatcgggctgaaatgcggaggttcggacggtttttccggcataaccgcaaacccgctgcttggacgtttttcagattatctcattgcacagggagggagcacggtgctgacggaagttccggaaatgttcggcgcagaaaccatcctgatgcagcgggctgccaatgaagaagtgtttcataagatagtccaattaatcaatgattttaaacaatattttatcaaacatgatcagccggtgtacgaaaatccttcaccgggcaacaaagcgggcggcatttctacacttgaggataaatcgctgggctgtacgcaaaaagcggggatttctcttgtcacggatgtcttgaaatacggggaagtgctcaagacaagagggctgacgcttttgagcgcgccgggcaatgatttgatcgcctcctccgcattggcggctgccggctgccaaattgtcctctttacaacgggaagaggcacgccgtttggcacctttgtcccgacggtgaaagtagcgacaaacaccgagctgtatgaggcgaagccgcattggattgattttaacgcaggtcttttagcagaggatgatgttcatgaggaatatgtgctgcgtgagtttatccactatatgattgaggtggcaagcggccagcttgtgaaccatgaaaaaaatgatttcagagaacttgccatttttaaatcgggtgtgacgctataataagaaaaggctatccttcaagcggatagccttcttcattaaatcaattttaaaccgctgactaaaataatggacgccataataaattgcagcggacgcggggagaatcgaggcgaaagatggctcccgatcagcacgccgggaattgaaccgaggagcagattagctgccagcatgtaatccacgcttccgaagcttgcgttcaaaatgcctgctgccgtaacaagaagaaaagcatgcgcgatatcggttccgacaatctgtgacgctttcatgttaaataagtaaatcatggcaattgcaaataatgagccagaaccgattgatgttaatccgacgataaacccaaacacaacaccaataagaattgtcagcgccctcttattttcaagcggcatcagctgccagcggttggggcgaagttttctatccaaaaacaaacgaacgatgattgaaatggcaaccagcgttaacacatatcctagagcgtgcttaataatttcttcctgatgctggtgaaaggcggggaacaaatgcaatatgccaatggctagcgaagcactcggaatactgccgatggctaagtattttaccaatttaaagttaatcgttttctgccgccaatgggaggcaacgccaaacagctttgtgatcgagttatatacaagatccgtaccgaccgcgatggaaggattaattccaagcacaattaaaaggggagttaataaggccgctccacccactcccgtcaatccgactaaggctccgacaaacaaacccatcaatatgatgcttacactcatgataaaggcctcctgaaaacccgactatttttatcagattatatatgattaggacgcgttaatcaattaaattttttgaatttttgcacgttagctgcttgaaattttggtatgctcaatatctctattcatttgccctataatgagtgtctggacgaaatcgagaagtactaaaggcgcaaaaaaaagatacctcttaacaggtatcttttttcttgtttacgctacatgcgctgctgatagaaaggaagctcagtgtggcccatttcccgcacatacacgaacaggttgcctttatggtgaatttcatgctccattgcaagctgaagcagcgcgcggcctgtgacttttctgccgaaagcggatgtcagatcaatttctctgtccagctgctcttcagtcagctgttcaaggatagcggccgttttttctgtatatgtttttgccagaacattgagatctgtttctgtttcctcctgcttgttttgaaatggtgaggcattgccttccttaatgacatttgcgaacaagtggaaagacgtaagaatgtgtttgaccagttcttctgctgacattgatgtttctgccggtttgtagctgtaatggtctttgctgattttttcggcaagctcattggtcacgtttcgatgggataaaaaatggctgacaatttgattggattggctcattatgatctcctccatatgtaaaaataaatggtgcaatgaaatcctatatcaacggttatgaattcacaagtaatatgctgtgggatgaaacaaaatgctatgtcaatcgtatatataacgttcacaaaacatgaaatggagtataaacatgactaacatacctttcatttatcagtacgaagaaaaagagaatgaaagagctgcggcgggctacggcactttcggttaccttatcacacggattgaagaaacgctttatgatcaatacggtgtattctatgagctctatgccagtgatgatccaaatacggaatactgggagcttcttgtagaagatgtccgcagcggttcattggagcctgagcatgtggcatatatatttgaaaagcttgaaaagaaaacctttgcttacgatgaagatgagaaagaaccggattataccgtccataagtctataagaaacagtgtatacgcgtatcctgaaaagggagttgcttttgccagaattccatattttcaagatgggagcattatgagttttgattgtctgtttgcggttaacgatgaaaagatgcgtgcatttctggagggagtcagaccgcgtctttgggaaaaaagcaagcggaaagtgaccgtgtttacggatggagatggagggacttcaagagagcaggaagccattgtcagagaggttcagcggagtcaagtcatcatgaatccgctattgaaaaaagagatatacagatcaattgatcagttttttcatagtgataaatcgttttatcaaacatatgacatcccttacaagcgcggcattctgttatatggacctcctggaaacggaaagacgacgttagtgaagtcgatcgcaggcagtatcgatgcacctgttgcttattggcaaattactgaatttacgtcgagcgagacaatagaagaagtctttcaggcagcgagacgcctcgctcctgcagttctggtcatcgaggatatagattcgatgccggaagatgtgcggtccttttttctcaatacgctggacggcgcgacatcaaaagaggggctatttctcatcggtacgacaaactatcccgaagagatcgatccaggtttgatgaatcgtgcagggcgatttgatcgtgcctatgaaatcgggcttccggatgaagagctgcggctggaatatatgaaaatgagaggctttggcatctttttgagtgaaggagaaataaaaaacgccgcaaaacttacagaaggcttttcctttgcacagctgggagaattatatgtatcttcagcccttcaatggcaccaagaagggaatcaccatattgaaaccatggtgaaagacatgacaggagagcaaagaaaaagccagcggggaagctggatggaaagaaacaaagtcggttttcactaaaagaaagcacgggtgtttgaaaaacccgtgcttttttgttgcggttagccgaaattcgacaattgcggttattttgcgttcttctttttcttgcaaatatgataaaatatgacatatctcgggtaattcaaaaaggggggattaattgaggatgaagcagacgattccgtcctcttatgtcgggcttaaaattaatgaatggtatactcatatccggcagttccacgtcgctgaagccgaacgggtcaagctcgaagtagaaagagaaattgaggatatggaagaagaccaagatttgctgctgtattattctttaatggagttcaggcaccgtgtcatgctggattacattaagccttttgaagaggacacgtcgcagctagagttttcagaattgttagaagacatcgaagggaatcagtacaagctgacagggcttctcgaatattactttaacttttttcgaggaatgtatgaatttaagcagaagatgtttgtcagtgccatgatgtattataaacgggcagaaaagaatcttgccctcgtctcggatgatattgagaaagcagagtttgcttttaaaatggctgagattttttacaatttaaaacaaacctatgtttcgatgagctacgccgttcaggcattagaaacataccaaatgtatgaaacgtacaccgtccgcagaatccaatgtgaattcgttattgcaggtaattatgatgatatgcagtatccagaaagagcattgccccacttagaactggctttagatcttgcaaagaaagaaggcaatccccgcttgatcagttctgccctatataatctcggaaactgctatgagaaaatgggtgaactgcaaaaggcagccgaatactttgagaaatctgtttctatttgcaagtcggaaaagttcgataatcttccgcattctatctactctttaacacaagttctgtataaacaaaaaaatgacgccgaagcgcaaaaaaagtatcgtgaaggattggaaatcgcccgtcaatacagtgatgaattatttgtggagctttttcaatttttacatgcgttatacggaaaaaacattgacacagaatcggtctcacacacctttcaatttcttgaagaacatatgctgtatccttatattgaagagctggcgcatgatgctgcccaattctatatagaaaacggacagcccgaaaaagcactttcattttatgagaaaatggtgcacgcacaaaaacaaatccagagaggagattgtttatatgaaatctaaatggatgtcaggtttgttgctcgttgcgatcgggttcagctttactcaggtgatggttcatgcaggtgaaacagcaaacacagaagggaaaacatttcatattgcggcacgcaatcaaacatgatgcataaaaaaagacccttaggggtcttttttatttcttcagcttccattcttttatcgtcagctcagaagatccacttgccaccagcggatccgcatggccgatttccgctgcctcttccagtgaatctgcttcgatgacatacgctccgcctgtggcgtcgctgaatggcccaaacatttttaaacgtttttctgcctgtaaacgatccagaaattcatagtgcccagccacatgctcctgattaaatttctccgttctcattgtcagcattaaatatgtatacatattcagaccctccgtgaacttcagtttaacacatttatccatattacagtgatagatgatatgagcttttcgtcctacgaatgccacctatttatgaaaaaagaaaaggagagatgataggtgagcattccagtaaagaaaaatttggtttctgaggcgaaatacgcgttgaagtgtcctaatgcaatgtccgctgaatacattaccattcacaacacggcaaacgatgcgtcagcggccaatgaaatcagctatatgatcgggaacacaagctcgacaagctttcattttgcagtcgatgatcaagaggtgattcaaggtctgccgcttaaccgaaacgcctggcacacaggtgacggcacaaacggtccgggaaaccgcaaatcaattggcgttgagatttgctacagcaaatcgggaggcccgaagtatgaggcagctgaagccttggcgatttcatttgtagcacagcttttgaaggagcgcggctggggcatcgatcgggtgagaaagcaccaggactggaacggaaagtattgcccgcaccgcattttatcagaggggcgctgggatcaagtgaaggcggcaattgaaaaggaattaaacgggggcgtatcagctaaaaaagctgcagtctcttcttcagcgtctgaatatcatgtgaaaaaaggcgacacattgtcagggattgccgcatcacacggagtcagtgtgaaaacgctgcaaagcatcaatcatattactgacccgaattacattaaagtcggacaagtgatcaaactgcctcagacggcatctgcttctaaaagccatgccgcatcctcatatccgctcccatcaggcgtgatcaaagtgacaagcccgctgacgaaagggacaaaagtaaagcaggtgcagaccgctttagccgctctttatttttatcctgataaaggagcgaaaaatcacggcgttgacggcgtttatggcccgaaaacagcaaatgcagtgaaacgttttcagtctgtcagcggtttaacggctgatgggatttacggtccgaaaacgaaagcgaaaatggaggaaaagctgtaaataaaaagacggaagctgtgaagcttccgtctttttatcttacatacaaactgcggcaagcaccttttgaatatcataaatgctctcatcttttttaaactgctttgagacggcaggaagttctgcgccggaaatccaaattttcagttctgaatcgaggtcaaagcggccggccgtttccacgctgaatctggaaatgcttttgtacggaatcgattgaaattccgttttcttgcctgtgattccctgtttatctacaaggataagccgcttgtcagtaaagacaatcaaatcgcgaaccagcttaaacgcggcttcaacattctcaccctccagcaaaatatgggcaagctcttctttcacagcagccgttgacagtgttgacgcattgccgagtaatccatcaataaaccccatcatatacctcctcttcgtattctatcaaatcatactataaaaaaggttttcattcatggatgagtagagtaaacttgtgctgactggtaaagggggcgttcaaaatggaagatatgtatgacagctttgcagccctttctgcttctgagtcggagtatcggattatttatgaggagaaaaacggaagtgagcttattgtcctcggtcctcacggcggcagaattgagcctggcgtcagtgaactggtgcgggcattttcggatcgatgttccatctatttgtttgagggtctaaagcagcgaaacaaccgttccttgcatctcactagcattcgttttgatgagccgctggctttagaaaaagtgaatgaccaccattacgcattagcgtttcacgggtattatgatccgaaaatcccgcatacattggtcggggggcggatcgtaaaaaagccaagctcatttgtgagcgtctgaatgaagcgggttttagcgccgagctcaccaatgagaaagaccgcctggcaggtgtacacccaaacaatattgtcaatcggacgaaaagagaaatgggactgcaattggaggtaagcacggcacagcgaaatgcgctattccgcaattttgggtgccgtgataaaagctacatacaaaacgatttgtttgatcgatatgtggaagccgtcaagcttggcttttataaataaaactagacgggacctgcacggtcggcctattccttcatacgctggggttgtgcgaaagtgtggggaggaatgattcatgttttatcatataaaagagcttcaatatcaagcaaagccagctcatcctgatccggtttatgcgaaaaaacttcaagaggtgctcggcggccaattcggtgaaattagcgtcatgatgcagtatttgtttcaagggtttaactgcagggcggatactaagtatagagatttgttatatgatgtggggaccgaagagattgggcacgtagaaatgctggcaacgatgatttccagacttctggacaatgcacccgcggatgtacaggaggatgcttataaaagcaatcccgctattgcagcagtcatgtcagggatgaatcctcagcacgcgattgtgtccggattgggggcgatggcatcagatagtgagggctatccgtggaatgcaaaatacattatctcaagcggaaacttgctggccgattttcgcgctaacttaaatgcggaggcccaaggacgccttcaggtgacacggctttatgccatgaccgatgatccaggggtaagagatatgctgtcatttttgattgcaagggatacctatcatcaaaatatgtggtatgcggccattaaagagctggaggaaagagaacgggatattgtcgtcccgacgacgtttccgcgtgagctcgaaaaacaggaagtctcctatgacctgtttaatttttccaggggggatgaaagctcacaaggaagatgggcacatggggaagcctttgacggccggggtgaattcaggtatatcccggctccgattgcgttcgcatctgcgcctcatcttaaaccggcgcccatgtggctgcataatacagttcccccaatgtcgaaatgttaggttctcttctgggctgaggaatatatcctcagcccttatttgatcagatgtttttgccaatatgatataacgctttttcctcagcgacctgcaagtgctgttgatcgccttcctcgtacgcatgtggccgcttgtgagataataaataagcgagccgcttctgaaattgaatacctgctttacgccgttcaaacatgtcaagccttttatcagcaaattcctttgttacccggaataccgccgaaattgtggcgagtgcctggcttctccattgcggcagttccatctgcaacagcataaaggttggcacacagaagtggtacataaattgatttgcctggaattcttgaagctctctgaagagcttgttcatctgaaaatgattgcctgcatgctttaacacgtggcacagctcatggccaaaatcctcccattgctcttcccgtgactttttttggtttaatacgatactatacatgccgtcgtatttcaccatcatgctccccatatcctcaaaatgcacccgaatatccagatcctttgcgattttcagcatgtcaatgtgatgaggggatgtgatgcccagccggccgtataaatttttaacgtattcctccagatgtgataagtaatcgcccaattgaatactccctttcgaacatttgttctatttttagcgagaaagaaaagcccgtataggactggaaagtagcgtagaaatctttcccttttctttaaaaaataaacacttttttctttatatcggtctactttttatatgttttagagaacagagaacgatttatttatttttcggtttgcggtttttctctttttcttttaaatagttgataaattcgatggcctgctgtttgctttctggggaaaaatcctgcatatcgcggtatgcaagctgcaggtccggatctgagaacatatcgtcatcggattttttgtctttccccgttaataagtaatcagtcgttacttgaaagtaatcagccagcttttggagtgtgtcgtaatcaggttcgcttcgcccattttcatagtgggaatatcgtgcccgtgacacaccgatgtgtgatgcgatctcttcctgtgtccttttccctctgagactcttcaatctgccgcctatcatactatgacctctcttttttaaactccctacgttacttatgattatagatacaaaatgtatcaaaataaagttatgataaaaaaagtatcaaaaataacttgatgatacagattgtatcgtttatacttggtaacatccgatacaaaatgtatcaaaaaagatcaggagagtgatcacatgtatccgatccaaatcgtttttagtgaaaatcccatagatcagcgccatctcggacaatccggcggcaccatttcgtttaccgcatgcggccttccggtgtttcactttgaaacgcaggaacagtttcaagcatacatgatgttaaaaggagaagcggcgtacaatgaaaaacgataaaagctatccttttccgacgtattcagggttattgaattcagaacattatgacaaaattggcccggcgttatggctgtttctctggtttatcagctcaacaacaaaagaaatcgaaaaagacggcgtaagctggggcatcgtactcggccataagccgttaaaagcgagagaaatggcggcagtcttcggcgtaagtgaaaaaaccgtcagaagatggctggagcttctcgaaaaccatgattacataaaggccgtccgtgcgccatacggactgatgatttcggtcaagcattccaaaaaattcagcttcagatcggacaatactgtacacgggagtctaaaagaacggccattttcgccgcagacaccggacacaaacgaccgtacagatatagataaaacaaacaaatatactgctgctgatgatgcagtggatcacattgcgaagcggtttacacaattacggtcggctcaagaaggacgcaccgtgtatccttcctcaagagattatcaagccatcgcccgcattgttgccattggcgttcctgtcacgcaaacaatcaaatggcttgaagaatgctttcaggcttttgaaaaccggcggaccgccgcttctgaaacaatcaaggcttttcgctactgctcgaaattcattgaagatcgatttttcgcgcagcaagccaaaaagaatgccgcaattcagcatgagaggatgaaaaaacatgacaaaacgaacaatcgaacagattttggacgagctgagaagagggagacgtccattactggcggacaaaccggccgaatcagacgcaagcaggtatgattgcctgcgctgcaaggatcagggaggttatctcgtcagacagaatggcctggaagtctggacgatgtgcagctgcatggcagaacgaaaagtgaagcggctgctgggtgcaagtgagattacccacgctttcagacagctcggcttcaaggaattccgcacggagggaaagccgcaggccataaaagacgcattggagtgtacaaaagagtatgttgccgattatgaacaaatcaaggattgccgaaaaaacagcattgcccttttaggacagcccggatcagggaaaacacaccttttgaccgccgcagccaacgaattaatgagaacatgctatgtgcctgtcatttattttccgttcgtggaaggctttactgatctgaaaaatgattttgccctattagaagcgaagctgaaccggatgaagcaggcggatgtgctgttcattgatgatctgtttaaaccggttaacggcaaaccccgcgctacagattggcaattagagcaaatgtattcggtactcaattatcgttacttaaatcataaaccgattttgctttcaagcgagctgacaattgaagcacttgtacgggtcgatgaagcgctcggcacgagaatctatgagatgtgcagtgactatttagtgattatcaaaggagcagcctacgagcttaaccatagattggagggcgtcagataatgtgcaagctttgtcaaacaaagaaagtcattgtggaacataccggtattggggtcgtttttcatccatgtccgaactgtcggtccggtactgacttaacgcctgtcattcaaaagctggagcaaatgctgacagcgggaaaagcgaggctgaatatctatgattaaacagctgactgcactaatcgctttgctgtttcgggcaaagcgaacagaaaaaaacattgaacaatggtataaggacgacgggaagtgaaagtgttggaaaaaacaaaacagacagagaaaagccctgcgccgtggcgtgctgtcccgtgcggggatacgaaaccgatctatatttattcagcttacagtgaagaagaaaaagaaagattcccatattcaaacggacggctgattgccgctgtatttgaccttagctcttattcgcaaaaaagcaatgccgctttgatggccgctgcgcctgaattgctggaagcgtctaaagcagcgcttgattttctgaaagggaattctgttcattcaaaggagcgcatcattcagctattagaaaaagctgaagcaagcgctgcaccgaaaaggggaggaaataaaacatgattcatcctaaaaaactgctgcatatcgattccgtcacgcttaagagccagctggaggacgggaaaatccgtgtcattattgtggatggcatcaagcaagaagcatggatcacagaagcgcccgagcatggaaaaacgctcgtcgaaacaagaaagggcgaccttgcccgagtggaatttgaaatcggctacaaattaaattaaagcgaaaacagaatacgtccaagacggaaagcctgcggacactgatcaactgcacagcatttgtgcgttgattggtgtccgttttttatttgccaaaaatgaggaggatcatagaatgcaagacttactatttgaatataaacgaacgctcaaacaaacaagaaaccaatataaaccgctcgctgaggcagatgaatccgtgctctcagctgaagagctgaaggataaaaaaatcatcagaaatatgattactgatcttgaatatgtaacagaatggcttgaaaaaggaaggcagcccggcatcagacgggcgattgaccggcgtgatgcttaccagcggctgatgatcaaggacccgagaatcatcgaatcattttccagcgctatgatgtttgagccggacggacaggtatcagaagaagacagagatagaattcgagaagcattagccctgttaacggacagagaaaaggaaatgtttttgctgcataaggtagaatgtttttcttatgaacggatcgccgatcttctcggcgtaaaaaaatcgacagtgcaaacgacgattaaacgggcgagtttaaagatgcaaagacagcaggaagacatgaatcgatcacttgcctgaaagcttgtcatacgtttgccacctataagtgaatagagcatgacacataagcggctggctgatcagccgcttttatgaataaacaaccatgctggaggtggcggtgatgccgtagcatgaaaacacaacttcgcgaacaagcattagcaatctatcaacaacatcaaggaaagatcacaaatcgggcgatcgcggacacaatcggtgtttccccgaaaacaatcggcatctggaaaaaacaagacaaatggaaagaggccctgttttctgcgtccaaaaacgaacaaaaacagcgccctatagacaacgatgaattaaatgaacgccagcggctgttttgcctgtattacgtcaaaagcttcaatgccacacagtcagcaatcaaagcgggctattctccggacagcgctcatgtgacgggcagccggctcttaaaaaacgaaaaggtcgctgctgaaatcagacgcataaaaaaagaaatggtcaatgaaatgtttattgaagcgatggacgtgctgcaggtttatatcaagatcgcgtttgcggatattacggactatgtgaccttcggaaaaaaagaggtccaggctgtcgggaaatcgggtccgctgtttgatgaagatgataatccgattatgaaggaaatcagctttgtcgatgtcaaagactccgggctcgttgatggcaccattgtaacggaagcaaagcttgggaaagaaggcattgccatcaagcttgcagataaaatgaaggcgcttgagaagctatccttatattttgatttgtttccagatcaatttaaacaaaaaattgaaaatgagaagttgaagcttgccaaacaaaaagcggagaaaacagatgacagccaagagccgattgaaattatgatcaaacgaaaagagggcaagtcatgattgtaaaagaaatcaaccctcatttcgaagattacgtgttcaattgggagcagacgtaccaatttctcgtcggcggctacggctcatccaaaagctatcataccgcattgaaaatcgtgctaaagctgctgaaggaaaaacggacggcccttgtgatccgggaggtgttcgatacccatcgggattcgaccttcgccttgtttcaagaggtgatcgaagagctcggtctcacaaaggctgtggcatctctttcttccccgctgcagctgcgatttcacaatggcagccggatcatgttcaaaggaatggacaatccggcaaaattaaaatcggttcataatatttcattaatatggattgaagagtgctcagaggtgaagtatgaggggttcaaggaattaatcggacgtcttcgccatcctgagctgaagcttcatatgatctgtaccaccaatcccgtcggcacctccaattggacgtacaggcatttttttcgggacgaacgcaataaacggtttgtgctggatgacagcgaactttacgaaaagcggacaattgtgaagggagatacgtattaccatcattccaccgctaacgacaatctttttctcccagaaagctatgtgaaacagcttgacgggctcaaagaatatgatcccgacctgtaccggattgcccgcaaaggaagattcggcgtcaacgggatcagggtgctgccgcagttcgaggtactcccgcatgatcaagtaaaaaaatgtatcgcagccatcagcaagccaatctttcgtacaggtatggattttggattcgaggaatcctataatgccgtcgtccggcttgctgtagatcctgaaaaaaaatacctctacatttattgggagtattatcaaaataaaatgacagatgataggacggctgaggagctgcgtgagtttattgagacacaggaattgatcaaagccgactcggctgagccgaaaagcatccaatatttccgccagcagggctttcggatggttggagccagaaagtttcccggctccaggcttcaatataccaaaaaggtaaaacggttcaaaaaaatcttctgttcggaccgctgtgaaaatgtcatctatgagctcaagacacttacgtatgccaaagataaaaacggagctctgattgaggatgaattcacgattgacccgcatacgctttctgccatttggtatgcgcttgatgattatgaggttgctgatatgaaagagacagcacacaaacgaatccggccgaaccgagaaaggaggaggtcataaatcatgcacaatcaaacagtcagagcaactgtatttaaagccaatgccgaggctcctcagacaaagcaaatctatgaggatgacttttctgagctgtacggagaggacattatcgctccgccctacaatatcatcgagctcaaaaccattgccgaatactcgaccattcttcagcaatgcattgatgcgtacagagtgaatattacaggctttggattcgatgttgagtacacatttgatgtcaacgcaagtgatgtcgatcaggcaaaaaagaaaagagcggaaaaagactgggccagactcgaagccttttataaatgtcttcactttgatgaatcagctgaaatgattttaggctatgccatcgaagacagagaaaaaacaggcaacggatttatggaagtgcttcgcgacggggcgggaaaacctgccggcatcgaatatttagatgtgaaatatatgcgtgtatgcggagcaggcgagcctgtagaggtttcatttgtatatgaagaaaacgggaaaatgaaaaggatcaaaaggcaaaaacgcttccgaaaatatgtgcagatgatcaatggaaagaaagtattttttaaagaatacggcgatccgcgaaaaatggatattcgcacaggtgaatatgtaaacacattggcagagaagtatcaagcaaatgaagccattcacctcaaaatcggaagcggcgtatacggtgtaccccgctggatcggcaatattgtcaatttatacggggcccgaaaagcagaagagctcaattttatgtattttaagcaggggcgtcacgtccccgctgcgattacagtggaaaacgggatgctgtctgaagcttcttaccgggagctgcaggaatacatgaatgatcttgaaggcgtggagaacgcccataaatttctcctgatcgaagcggaaggaatcgcaaaagaaaaggatctccacggaggcgaggatattacgccggtttccgtggaaatcaaatccttggcggaaattctccaaaacgacgccctgtttcttgaatacgatgaaaaaagcagaaataagctgcgttccgcgttccgcctcccgccgctgtatacaggcgaggcccaggaatacaaccgggcgacagctgatactgctagaaaaattacggaggagcaggtttttcagccggagcgaaaaacgctcgtgaataaactgaacacgctgcttttgccggagctgaatatccatgacgtcaggctgacattaaaaggaccggactttcgtgatccgcttgagattgcgaaggtgctcggtccttttattacagccggagcagtctcaccgaatgatttacgtgaccttgccggacgggtgcttggaaaaacactggaggagtggccggaggacatttataaacggcctgcaggacaggatgcggaaaagacaaacctgactgcgctcatgcaggagttgaaagaaagcatcgaagatatcaaaacgtcctgaagggaggtgaatcaagcaggtggcgcgagaattaagaaatgccaaaatcagctttgtcagttatgtggacaaggcggctaaccagacagaatttttctttacgaagtcagccaaacctccgtcatttgaaaaaaaggttcggctgtttacaaaaagtgagcaggatgaacaaaagctcgtgtacggaatcgtgtatgagcctgatgttcctgatgcccacggcgattttatgaccgccgaggaaattgaaaaagcggcgcacggttttctcgcggaggcacgggagattgatatcaatcacagcttcgagggcggaaccggcgtcgtggtcgagtcctatgtggcgcccgatgattttatgatcgggtcaaagcggattacaaagggctcatgggtgctcgtgacaagagcgtcagacgaggtgtgggaacagatcaaggctggaatcatcaccggctacagcatggcgggcactgcagatgtatatgaggaagaaccggttgaaaaagcgggattcttcagtgtattcaagcaaatgcttgctgacaaaacagggaaggagactgaagaaatgagaaaagaagacatgaaagaatcattcgagcatgcgctttaccctctgctcaaacggcttgagcggattgaaaaaaacacagacacggaggaaaagccggagcagacgggtgatgacgagcgtctgaaaaagctcgttgaagacatgcttgccccgctgatcgaacgcatcgaggctttggaaaaagcgcgaggcgcgtctaagcagacagcggacgatacgggcggcaatacagagcaagtcaaaaaatcaatctggagcggactgctgtaaaaccagtcaaggaggaggaaatcaattgagaaatcaagagatcattcggaaagcggaaatgtcgctttctgctttaaaaagcggcgggcttatgaaccctgcgcaagcatcggcttttatccgcatggtgcaaaacacgccgaccattttcagtgaatcccgcgtgattcaaatggaaaatgactcgcaaaaatttgagaaaatcggcttcggccagcgtattctgcgggctgcgcaagaaggaaaagcactgtcaaacgacgagctgacagttccaacgacaagcactgtccagctgaacacgaaggaagtcattgcggaaatcaacattacgtatgacacacttgaaaacaatattgaaaaagacggcctgcagcagacgatcatgcaaattttagcagagcgcgcagcagttgatattgaagagctgatcgttaacggcgatacagcatcagctgatccgtatctggcacagctggacggcatccgcaaacaggcggtttcccatatcgttgacatgaacggtgaagaactgtccagagcgacatttaagaaaggcttaaaggcagttccgccaaaatatttgcgcatccctcaggaattcagattctatacgtctcacggcttagaagttgaatggaaggaccgcgtggcagaccgccagacaaaccttggggaccaggctgttcagggcggcttgtcaacagcattcggcgtaccggtcaaaggagtatccaatattcagccgtacacagtcggtgagggagacgcgcaatatgacgcttctgatatcattctcacacatccgaaaaatatcattctcggcttctcccgcaatatccgaattgaagtcgacaaagacatccgctcccgtaaatttattattgtcttaacggccaagctggacagcaagttcgaggaagaggatgcctgcgcaaaattaattaacgtaaaagaataatagaaacgaggtggtcagctcatgctcattgaaccgactgacgtagcctcctattcggtctatgatcgggtgaaaaacaggccggaagagctgctggcgcaggatatcatcgaggcggaagcagaagcggctctcatcacgggccaccgctttgaagacagcttgtatgatccgctgcccggcaaggtgaagttggctttagtaaagcttgcccagtattttgcgcttgtcaacagcgatgaatctgcctcatcaagctatcagtctgagaaaatgggggattattcctacacggtttccggagaaggcggcattcagcggccagaggtatatcatttgctcgaggagtttatcacgccgggctacgcccctgaatcctccagactgaaggtgaggtctttatgagctacaggcagatgctcattcatcgctgcgacatttatcatgaagcagcgcaagcgccgtctgcaggccgatttgggattccggcagacaggctgcagccggtgatttcatatccggatacacccgatgaacaagatgtcccttgttattttaccgaaaaaacgcagcagctgattcaggaggagccggatcaaactgtatatcatagctttctcgtccattttccgttgtcagcggacatccgcgtgaacgataaaatcatttgggagaatcataaatatatactaaagctgccgaaaaggatcagacatcatcattgggaggtcgtcgcagtcagggatgaaagcctatgaaaatagcgggattgaaacagctgaacacggcattaaaagaagcggcttcaggcggtttttccagacaggcgtcccggtggcttgaggagtgcgggcaagattttctggagatcgtcaaatctgaactcatcagcacacaaacgattgatacagaaaaactgctcagttcctttgagaaaggcgcagaggacaatctctggattgtgcaaagcggcgggctttcgcttgaggtggggacacagcttgattacgcctcatttcttaatgacggccattggacgtcaaaacaagatgtgagatgggtgccggggcgttttcaaggctcacggtttatttatgatccagccgcttcaacgggaatggcgctcaagagaaaatggataccgggcacgggctactgggatcatgcactgcttttatatgaacagctgtttgaaaaatcgctggaaagcaaactgcgccagtggctgaagaagctgtaaaggaggagcaggatgaacagtgaaacaggatcgatcatggcgtttttgtacagccggtggtctgttcccatttatgaacgcgagcttcctgatcactttcaggtgccgtcgttatacgtcccgccaccatctgttttcgaggaaacagatacggtctccacatttaaaaaaacctacagtctcaatgtaaaactgtttcatctggactccgttcaggcgctggatgaagcggacaggctcgcggatgccatcagagaagcgagaaatatgattccgctgctgagtgaatccggcgagaagacgggggatatggttcgcatctcccaaatcgagacaagggtaggggacaggggcgaggcggccatggtgatcaggtggagcagccgatattattatcacaaaacagaacagcctgtcttacaggatatcgacatgaacagcggggtgaaataaacggtgtcaaaggacaaacaacagaagaaggctgtacatacaaagagccgggaagctctatttgatacagcggatttgattaagcacgcgaaggaactgttcggcgttaagccggatattcttcagggggctttatttggcgtggatcaaccacgtatgacgaaatcagaagccaaccaattgattcaaacatttctaaccaaggaggtcatgtcatcatgaatggcggaacatttacaacaggcaaagaaaaagaacgtgcaggtatttattttaactttaaaacgacggcacaggagcgggtatcactcagtgaacggggaacagtcgcacttccggtcgcatcaagctggggcgaagcgaaaacgttcgtctccatttccagcgttgaagacctaaacaaaaaagtgggcctcagcattgatgacccgtctttattgctgctgcgtgaagcgaagaaaaatgcgaaaacggtattgatgtaccgtctaaccgaaggtgtccgagcgtctgctgatattgctgaaggcgtcaaagcaactgcagtatatggcggaacaaaaggaaatgacattatcatccgcatcaatcaaaatgtgctggatgctaattctttcgatgtgacaacatatatggacgaatcagaggttgataaacagactgtcaaaaaggctgaagaattaacagctaacggctatgtcacttttaccggaacaggcgatctttcttcaacgattcctctcactggatcagaaggagacactgcagctgagacgctgaatgcatccgcgggaatccgtttatctggcggtacggataaagcccctgtcaactccgactatacagatttcttagccgcggctgaaacggagagctttgatgtgattgcgctgcctgttgcagaaggtgaccagttgaaggcgacgtttgctgctttcattaaacgcctgcgcgacggccaaggacaaaaagtgcaaggcgtcacagccaattatgccggtgattatgaaggcatcatcaacgtaaccgagggtgtgctgcttgaagatggcacggaagttacaccggacaaagcaacagcttgggtagctggagcgagtgcaggagcaacctttaaccaatcactcacatttgtagagtacgaaggcgccgttgatgtgttacaccgccttgaccacgatacgattgttgaacgtctgggcaaaggtgaatttttattcacattcgacgcccgtgacaaatccgtcagcgtagaaaaggacattaactcactcgtgacgttcacagctgagaaaaacaagaaatttgcgaagaacaaaatcgttcgtgtcctggatgctgtgaataatgatttaacacgcgagctgaaagccttaattaaatcaagaaaaggcagcggaagcgatatcccggcatctgaagacggactgcagtatgtaaaaacgatgatcacgcaatacatgacaacacttcaggatgcaggcggcatcactggctttgattccgatgaagatatcacaatttcaatgaatgaagatcgtgacggcttcttgattgacctggctgtacagcctgtcgacgcagcagaaaaattctactttaatgtggaggtaaactaatatggcattaaaagcacaaaacacaatctcaggaaaagaaggccgcttatttctcgatggtgaggaaatggcgcacatcaaaacatttgaagcaaacgttgagaaaaacaaatccgaagtcaacattatgggccgccgcatgacaggccataaaacaacaggggcaaatggaacagggaccgcaacgttctacaaagtcacatcaaaattcgtgctattgatgatggactatgtcaaaaaaggcagcgacccttatttcacgctccaagctgtgctggatgatcaatcctcaggccggggcacagagcgagttacgctgtacgacgtcaactttgactctgccaaaatcgcaagccttgatgtcgattcagaagcgttagaggaagaagttccatttacattcgaagacttcgacgtccctgaaaagctatctgacacgttttaatcaaagctgaatcagcccatacgtagacctttctcagaaaggtctgttttttaaagatgaaaccaaacaatagacaagggagttttttacatgagcgagaagaacgaaaacgtatatgatctttccttttttatgccgggaaaaacaattgaagctgaggaaatcaaagtgccgatctcaaagcgttttgttgataaaaaagggaatgtcattccgtttattttaaaaccaattactactgaacggattgatgaattagagaaagaaaacaccacatttaaaaatgtgaaaggccgcggccgcgtcaaagatttagactcccagcgcttttatgcgagaattgccatcgaatctactatttatcctgattttcgttcaaaagatttaagggaagcatacaaaactgcggatccggtagaagttgccaaacgtgtattatctgttgggggagagtatgcgaactggctgaataaagcaattgaaatcaatggttttgaagatgatcttgaagatctagaagaagaagcaaaaaactagtaaaggatggcgataaggaagctgtgtatttgtactatgcaatgcatgagcttcattactcgccatcccaacttcttgaattatatgaagcaccaaaacattttaaagctcttttatttgggttgataggttataagctagatctattagaaaaagaatcaaggagaggagggaactaatatcgcaaaattaacagcccgttttgatctcgaagacaaggtatctaaaaaactaaaacggatacataaaggattccaagaggtcgaaaaaaaagtcaaaaccattaatcggcaaatcaaaatcagtatcagagcggaagatcaggcattttaccggctgagaaaaataaacgactatatcattttgaaattcgcgaaatcgcttgagattaaagttgtacttgatgaccaagtcacatcaaagcttgatgcaattgaaagaaaacttaaacggctgccgaaagaaacgaagctgactgtctctttggtagatcggacagcagctgcgtataaaaaaataaagaagatgctttctaatcaaaagctatcattccttttgattccagatgacaaggttacttctacagttaaaaggattatcggttatattaagaaaaatttgaaaaacggatacacagtaaaactaaaggtcatcgatgaaatcaccaaaacagttaatcgattaacagcccttctaaggaaatttgaaaaaacctattatgtaaaagtggttgttaagacaaaaatatcagacaaaatcaataaaaaagaaagcccgattaacaaagaaacttctaagaaagaatcagacaaatcctcagataaaggctctgataaaaactcagatcaaaaacctggatgggtcggaaaaataaaaggctggctgaaggattggtggacaaaatcagcttggccttggatcaaagatacgctcaatgaaataggcaaagcttttttggatcgtttcaaagagagattgatagaaaagctgaaaaatgatgtgtttgataagatcattgataaaattctaggaccacaaaaaaaggacgattctggtgaaaattctgacacagataaaaaagtccttaaccgtaatacaggaggaaattgttgctgtgactgctgtgaaggcggtatcagcccgggcactaaaaataaaaaaacctatagaaaaaagaaaagtcccacaaaggctccaaacagaacactcaaggttcctggagaggtgataagaagacgtcaaagcggcacacctgctgaaagtgcacctaggacctcgggttccaagttaaagaactggcttggaggcttaaaatcgctagggaaggattcatccaaactaggtaaagcgttcagaggaatgggaaaggctgttccatacgtaggatctgctttagcagtgtttgatttagctggaatcaataaagataatgctggcgaaaaggttggttcaatcggaggacgcattgccggagcggaagctggtgcaacagccggagcggaagctggtgcaacgattggatctttcgttggtccggaaggtacagcaatcggcggggcaatcggcggaattggcggcgggttagtaggcggaatcggcggcgaagaagcaggtaagaacattggtaagatgtttgatacttctaagttaaaggagagcataagcaattcactatttaacaaagagtggtggagtggaaaatggaactccatttctgatactgccaatggggctattacttggattgaagatacatggagtaaagtttcaacttggtttgaccagtatgtgtttacacctatatataatgttgctgtacctgtaattaattttatagtaggattgtttgcctatgcatgggatggcatattggcagtatggaacattgtctacccgtggtttaaggataacgtgtgggatccaataagcggagcagttactaatgttgctacaacgatatggactggattgtgcaacgcctggacggttatttcaggcatatggtctactgtttcaacatggtttatggacaatgtgtggaatcctgtaagtgaagccgtaaccactgcggcaacatggatttggagtaagatcaatgatgcatggacaataatttccaatatttggacaggagtatcgaattggttttatgataatgtatggaacccgatcgtcaaaaaagtagaagatattaaaacttcaataaaagaaaaattcgatgatgcaaggaaattttttgaggatgcatgggatggaattgaaacttggtttaatgaacatgtgaaagatccattggttaaagtatcagagaaaattgctgagaaatttcaatggctattcgatttaaaagattcagttggtggtttcgttgcaaaagtaatacacaggggggaagaagttactcacctcaagaaaaaaccaatcaaaaaggattcgaaagagaaaaaaactagttccaaaccaactactaataacatttttgctcaatctccatcaaataataatatgactgtttttcaacaagcactagatcagaacgccacaggcggctacatcaccaaaccaaccatctcgtggatcggtgaagccggcaaggaattcgttatcccggttgataacaaccgaggccgggggaagatgcttctttcacaagcggcgtctaagctgggtatgcaagttgtagacgacatgggcgcagcttcgtcttctggcggaagtccagcatctgtttcaggaggagcagctgtcagtcctctatcaggcacagcctccccagtaatgaacactgcaaatcttacaggccaagcgtccacactcggacagcaattttcagaaggctttggtaaaggcatcagcgatcagccggtcaaaatggaagactggaaaaagaaaaacatcaatacgccatttacacaaatgatttctgcttcaccaaattacggtaaacaaatggtaagtgggtatgccaagggccaaagcggcactgcaaccggaacagacggctttttgcaatcaaaagttaaaacgccgttccaagccactgtgagcaaatcgtcttcatggggcacaggaacggtcaaaggctttgcgcaaggacaaaattcaacccaaacagggactgcacagtatgtgagtacacatgttgacaaaccgttcctgcgttcaaaagacacatcgaacagctggggctccggtttgattggaaactttgtgacaggcatgaattctaaatccagtgaagtaaaacaagcagcaaaggatatggccaagagagtggagcaggctttccgtgaagaattagatatccattcaccttctcgtgtcatgatgagcttagggcgttttgcctccgttggtgttgtaaaaggtctggattctgtcgatgtgaaaaaatatgctgaaaagcaagctggatcactggcagctgcttattccggaatgggtgcagtaggtggaaatgtgaagcagtggcttatggctgcaatgatggccacaaaaacaccattaagctggcttccgggattgatgacaattgcaaagtttgaatcaggaggcaaccctaacgccattaacctgtgggatagtaacgcgaaggcaggcaatccatcccaagggctcatgcagacagtaccaaccacttttaacgcacacaaagcgccaggcatgggtaacattagaaacccgattcataacgctgctgccgcaatcggctacatcaaaagcagatacggctctattgacaatgtacctggtattaaaagcatgaagcatggcggaccttatgtcggttacgcaaacggcgggctgattacaaaagaacaaattgcacgtgtcggtgaaggaaacaagcgggaatggatcatcccagaggaacgtggcatccgaggccgctacctccttcagagagctgcgcaagctctgggaatggaagtgacagatccgtctcaatcccagcagtctgagctttcttcaggacaagtttcagcagttacatccggtacacggcaaacgatacaaacagccggaacgaaagaaataaagattgagtttaacggagaccagcatttccataatggacaagacgccgaaagccttgcagcgaaaatcaagcaggcgcttatagatgaattgcaaaaggatatcaatattggaacgaagggagtcgttgcatttgactaaatccgtatatgaattttggatttcacaagggaaggacaagttgcggctccccgttcttcccgaccagctgaatatttcaaatacgattcagaatgagacggttaaagtagccaagttcggtgaccttacatttattgacgaacaaggagcgaaagaaatttcgttctcttcgttttttccgaagaaatacagcccaatagctgaatatcaaaccttcccgtcgccggaaaatgcgataacaaaaattgaaaaatggatgaaggccaaaaaaccggttcagtttttgattacgggaactaaagtgaatttaacatgcagtattgaaggtttttcctatagcgaaggccagcaggatataggtgatcgttcctttgatattcaattaaaagaatacaaaaccgcttccccgcggaaaatcaagcagaagaaaaaaacaaaggcaaaacgtccgtcgaaggctgcgccgaagacgtacacagtgaaaaagggagacacgctatgggacattgcaggcagattttacgggaacagcacccaatggcgcaaaatttggaacgccaataaaacagcaatgatcaaacgaagcaaacggaacatcaggcagccgggccactggatttttcccggccaaaaattaaagataccgcaatgaaacaggtgatgtatgatgatagaactgttcgtcattaaagacacagagtggcttgagctggttgcagaaagcgtatcgcttgaaggccatcgttatcaggcgccgcgttctattgaagcaaccatcgtcaccaagcagggcgaccagacgtattacagtgtctcagaaggagatacggtcttgtttaaatggaagggaaaagagctgtttcggggcattgtttttgcaagaaccccggacgagcatacgcttgccttcagcgcttatgacatgcttcagtacctggtcaaaaaccaggatatgtacgtgttttccaatcagcgggccgaccagatcataagaaggattgcgagtgacttccagataccgacaacctcgatcgcaaacacaggccatacgatcaaaagtcttgtcattaaaaatgatacgacattgtatgacatcatattaaaagcgctgaaacagacgaaaagccagacaggacgacattaccagctgtattcggaaaaaggaaagctcggtctgcgcgcttggccagatccgtcagaagtatgggtgcttgaaacgggcgtcaatatcacgggctaccaatacagcacttctataaacgatactgctactcgggtggtgcttcgccggcagaaggacaataagacatataaagcctctgccaaggacagttcaggcttaaataaatacggtgtgcttcaatatacggaaacggtcacagatgacatcaaccaggcacagcttcagcagcgggcagatgtacgccttgctgaaaaaaagggcgtgaaaaaagaactgaaaaatattcaggcagtgggcattccggaagtgcagagcggcttgcccgtctatatttcgattccagaggccggcatcaagaaaacctattgggtagatacggaccggcatgaatttaaaggaacgaaacatacgatgacgatcgatgttgtcgaaaagaatacgatgccggaaggagtatcctgatgagattaagtgaggctataaaacatttggcagtcggcgcaattgacgctgagtctccggtagaactgctcccggctgaagtcgtttcggtttctcctgtggaaatcaaattaaaagaaaacagcaaactgatcataccggaagacgccatcattatcccaaaacgaatgcagtccggaggagacgatgcactcgaaccgggggatcgcctcatgaccgcggctctgactggcgggcaatcgttttttattttagataaggtatagacaaaccgcttcagtacgaaggggtttttatttagcatgtaaaaggagtgggcatcatggccctgacaccagaagtggagtttgaagatattgaagatgtgagtgaaatcattgaaacctcgcaaacgtacaaaatagattttgaaaacggaagaattacgaatgagctgattaccgggcttgaagcgatcaggcagttcgtgtatatcgccttacagacagaacgctatgcgtattccatatacagccataatgtcggaaacgagcttcaggacgtgctgaccgatcatgagacaactgatgcctataaaaagatggagatcccgaggctgatagaagaggcgctggtttatgatgaccggatatcggctgtaacagattttgagattgaaaaacaaggcgacgcgtttcatgtgtccttcgtggtggagacggatgaaggaacgcttgagattgaggaggtgattggcgaagatgtttgaagatcagacttttgaagcgattatggagcgtatgctgaacagcatttccgcagatattgacacaagagaaggcagcgtcatttataatgcgttagccccggcggcggccgagcttgcgaagtcttatatatggctggatactgtgcttgagctagttttttctgataccgcacaaggcgaatttttagacaggcgtgcagcggaagcgggaattgaaagaactgccgcgacaaaggctgtcagagcgggagagtttacatctggagttactattcctgtcggctcccgcttttacgtggataatctttattttcaatatacggcagacgggacgctcatctgtgaaacacctggtgaagcaggaaacgccaacctgaccggacgcaatttactgtcattggataccattcccggtttagaaacggccattgtcaaagaaatcctgattccggggcgcgaagaagagggagatgacagcttgcgagaacggtattttacaagggttcggcgtgaggccgtcagtgccaataaaatgcattataaagagtgggctgaggaagtggacggtgtgggaaaggcaaagatcttcccgctttggaacggtgaaggcacggtcaaaattgtcgtcaccaatgcgaatcttgagcccgcttctcctattttaattcaaaaagtgaaagattatatcgaccctgaaccaggacagggagagggacaggcgccaatcggagccgttgtcacagtggagagcgcggtctggaaagaagttgagatttctgccgaagtgctgcctgagatcaatcactcaattgatgaagtgaagtcagaaattgaggaaggcgttttaaatctctttaagaaaatggcgtttgaagataacgtcatccgcctttctcaaattaacaatatcgtctataattcaccatcagtcagtgactactccaatattcaaatcaacggcacgtctgaaaatctggtgttgagcgacgtggaaattcctaagcttgggcaggtgaagatcattgagcaaacaagatgacatgcgagcttatctgccgccgtttctcaccagccttaaagaaatggctgagctgctgaaagcggaagcgcctgagtttgataaacaaaatgacagcatatttgatctgacggatcagttattcgtgccgacggcgacatgggggctcagccgctgggaaaagattttaaacgtaccgcgggaatcaggtgacactgatgagatcagacgattgaggctcatttccaaaatgtcgaacatcccgccaatcacatacagggccattgagcaggcggtaaaccgtttcttgaaaaacccgtctgcacaggtccgcctgattcccggcgaataccgatttaacgtcgatatcaatgttgatgacctccagcacatgaatgagctgatcgaagcgatagaaaacatgaagcccgctcatttggcgtatacgctcagaggcggattgaacgagacgctgcaaatcaaagacacagttatcctgaatcatcgcagataccgaacagccagtgagctcaaggtcggttattctgtcactcttaacaataatgaggtggtcttaacttgatttcaaccatatacagagaacgcacagcggctgatctaaaaagcagaatcgatcacgtgctgctcaacggccaaaaaacagaaatagtagatctcaccattgacggtgcgaccgtcaccattctgacaaaacgtgaggaagacatcaagcatatcgaaacggtacaaatttttgacgagctgggcaatgtgatcacagagagaaagactgacctggacgtcagcgaaaacagaacacttgatttcagatttacttttgaggtggtgtaaacatggcatacgaagaaaaaacagactggcttccggacgaccccatcaacgaagatgacgtcaaccgctgggaaaaaggaataaaagacgcccacaccgacctggccgcccacaaaaacgacatgaacaacccccacaacacaacgaaggcgcaaatcgggctggggaatgtggataatgtgcagcaggcggcgaagaaggattttgacaagcatgtgaatgacggtacgattcacattactgctgctgaaaggtcaaagtggaacaacgctcagttaagtaagatatcaggtgatgatggaagggtcttttacaagagtgtgaccgaaattactgattataatgatttaaccgatactggtatgtacttaatatacaatgacggcttgaagggtccgggcctaaatcagtgttttctccttgtgatgagctataaaaacacacttgttcaaatagcttatgacggaattaagggagagcagtcattttttagaataagaaaaaacgattctacaacatggacaccatggattgaatcagaaactacagaggggtctcaaaagaaaatagatgcacatgctaataaaacagatatccacgtaacaaaatcagataaagacaagtggaacgactcacagctctttaaaataactcaggataacggtctcgcaaagtactgtgaagatgcagatttcaatactgtcatcgaaactggattctattacatgagtggtgcgacaacaacattaaatgctcctgttaataacaatggttatttaatggtttataatttcagcacgtatgcatatcaagaatacacgtcttatagcagtagtgacacaatatcaactggccgaaggaaattcatgaggaataaagtggctaactcagacgtttggacatcttggcgtgagatcgaatcggttgaaggctcacagatcaaagtagatgcacatgccaataaaacagatatccacgtaacaacatccgataaggacaaatggaataatgcacaactatatagattaacagatactcaaggttgccgaactaaaatcccagatgggactgacttgttaacactaccctctggcttttactatgcattagggaacgtcataacaaataatcctgtttcaggagatggatcatggtataactatgatgttatcgaaacagagggaggcggacgaaaaacaattttggcctctagaagttatgacggaaccttttggacggcaacgatccatacagacggcgtgtttaaaggctggaataagatcgagactgaggtaagtgctcaaaccaaagcagataaagcgctagctgatgctaaaaactatgttgactctaattatacgaataataaattaacagttcttacaggctctaatgcaatacaagacgcaagaactggggggaatgaatatcctccagggttaacactaatggatattggtcaaggaaatactacaggttatccacttggttatggaattgtaaaaaatgagaaatacagtgattttagatttactcaatatttttacggtacaggaaatgaatcaaatagttatattgatagtactggaacgtgggttcgtcactggtggagtggttccggctggactgcgtggcaaaagatatcagggtttgctcacgctaatattgggactactgggcgtcaagctcttattaaaggagaaaataacaaaattaaatataaccgtattataaaagatagccataaattgtttgatacaaaaaacaataggtttgtagccagtcatgcaggaatgcatttagtcagtgctagtttatatatagaaaatactgagcgatactccaattttgaattatatgtttatgtaaacggcacaaagtataaattaatgaatcaatttagaatgcctaccccttccaataacagtgataatgagtttaatgcaactgttactggatctgttacagttccgcttgatgcaggagattatgttgaaatttatgtttatgttggttattctggagatgtaacacgatatgttacagattcgaatggagctctcaattattttgatgttctggagcttggcggaagaaattacccgagagtttaggaggtacctttatgatcttatatgatgccattatgtacaagtatccaaacgcagtatcgagaaaggattttgaattgcgtaatgacgggaacggttcatacattgagaaatggaatctccgggcgccgttgccgactcaggcagaactcgaatcctggtgggaggaatcacaaaaaaacccgccgtacgagccgcctgatcaggtggagcttctcgctcaagaattgtcacaagaaaagctggcacgcaagcagcttgaagaactgaacaaaactttgggaagcgagttgtcagatataaagctttccatactttctttgaaaggagattactctgaatgaattattgggtgcttgccctctattatgagtgggcgacaacggatatggtgaaacaggccttagcatatcaagactgttcaattgaggatctggcagagggtgtgaacaaaaagctgatcacagctgaccagtataaagaaattaccggtaaagccatgtagtaaggcttttttattttgcctgtttttagatcaaaggaggatgaagatggtgaagtatcaatatgaatttcctctcgataaggctggaaaagccggcgctgtaaagccctatcgaggaggaaaaaatgattttgtgacacctgtttcgaatttgtcaggcgtagcggagattttaacaaatgcttccttaaaggcgactgaggcatacagtcagctcgggcaggacaggcttggcgcagttctgatttcgaaagtgaagggctgggcgtatgcagatcgtgaaggtacgctctttatagaagaaagcgacaacaacaatgtttggacaacgacagcagcagttaatgtcgcagcaggtgtcctgacagcgacggactgggtatacctttctaaacgctattaccgtttccgctatgtgaacgggaatcttcagcaatctgagtttgtattataccaatcagtcggtgcgggtgagatggatgtgcgtgtcaatggaaaaacgcctttacagattgactttgcggagaatcaaacacacgatggacggctgaaagtcgaggctcgcaaaacatttgactttgtctttcatgaaaatgcagagtccgccggcgagggtgcttctttacctgttgacggtgccgcgcatttactcgttgaagtatatggcacagcggaaatgagcgaagtcaaattttggggcaaatcggtgtcagggcagaaactgccgatcagaggcgtgaaaactgatgatgccacctctgctttgagtacattaggaaaagctgaggcatgggccttcgatattaaagggtttaaggagatcatcatggagatcgtcagtatcaccggcggtactctctcggtaaaagggaccgctgtttcataacagttttggctctcggaagggaggtgatctgcatgtgaaggaggagtgaataatgcagcaagaggcagatgtgaatgtgtttcagcaggatttagcagacatgaaaggcgagcacaaagcacttgagcagagggtttccgcattagaacgcgtgtctgaccgtcaagaccagcaaatcatgacgctgaacgaaaaattaaacaaaattgaagaaaacactacgtggattaaacgcaccatcacaggtgccatcattacagcagtgtctacaggcatcattggcggagccatcgccattatgtacagcctgctgcagcattaaagggggattttcatgaacacgtttgacaagggcacggtcatcaggacggtgcttcttttaattgctttaatcaaccagaccatgctgatgctcggcaaatcaccattggacatacaggaggagcaggtcaatcagctcgctgacgctctttattcagccggttccatcgtatttacaattggaacgacacttatcgcttggtttaaaaacaactacgtaacagaaaaagggaaaaagcagcgcgacgtgttaagggacaataatctgacgaaataaggagagatgaaaatggttaacattatccaagactttattccggttggcgcaaataaccgtccaggctacgcaatgacgccgctttacattacggtgcacaatacagcgaataccgcagtaggagcggatgctgcggcccatgcccgctatttgaaaaatcctgatacgacgacaagctggcattttacagttgatgatacagaaatttatcagcatctgcctttgaatgaaaacggctggcatgcgggagacggaaatggcagcggtaaccgggcttctatcggaattgaaatttgcgaaaatgccgatggcgattttgaaaaagcaacagcaaatgcccagtggctcatcaaaacattaatggctgaacataatatcagtctcgccaatgtcgtccctcataagtattggtcaggaaaggaatgtccgcgaaaattgttagatacgtgggattcgtttaaagcaggaattgggggaggcggcagccaaacttacgtcgtgaaacagggcgacacacttacatccatagcgagagcatttggtgttacagttgctcagctgcaagagtggaacaatatcgaagacccgaatcttattcgcgttggtcaagtattaattgtaagtgctccatcgtccgctgaagaacccgagctctatccgctccctgatggtatcattcaattgacaacaccttatacctcaggagaacacgtctttcaggtgcaacgagcacttgcggctctgtatttttaccctgataaaggcgctgttaacaacgggattgacggcgtttacggaccgaaaacagctgacgcagttgcccgttttcagtctgttaacggtctaactgctgacggtatctatgggcctgcgacgaaagcgaagatcgcagcgcaattaagctgatcacagaccataaaaatcccggagctgctccgggatttattttttcttcttcaactttttaataattccagcactgcgctccctcacccgaagcgagtacccggaaagcccaaaccttccgtaatcaacaaacttcacacgcctcaccaattttttcactgtatcacctgacattatcctctgtttgtatttattatatgtaaccctttaagaaaaggaataaggacaagagctgttttcccttgtccttttagtgtgatcatgctttttttcgtttatactcgtcaatcagccgttcgttttctttgaagattcttgctgtatgcggactgacttgatagcttgcgacactggtggttgaacgttttttcaggattttaaacggcttcgccgctctgggctcgcatctgttttgaaacgcacgttccattatccttcaccttcctcctcaattggcagcaccaaatcatatatgctcgttaatgacgtaaatagcaaataatcaaattccgtgacaatgctgtcagacgtcagcttgatgacatagttctgtgtctcgatggtaaaagggatgagaaccacttttccgtattggtcgtaataaacatcctttcgatcgagccgtgtttgtacatctgccggatcatccatatgctcggttaaccggtctttatcagcctgtgtcgaatagtggcaaagagaagccgttaagttcattttatcagcataggttttcagcagcttatcaataccttcagcataagcatctatacttccataataaacatggatcggctcgtttttcaataggtattggtatgttttcagccgattgagatacatgtggagcatttcgttgttttcttcaagaatttctcttgtgtctgtttcaagctcgctgccggccagttttttgacgtatgcacttaagaagataaaagcatcaatcaaagcaaaactgactgcgacaatgagataccgttcccagtgggtaaatagggaagtgggctcatatgtccagtataccatagcgcctagaacaaacagcaaataccaagttttccggatggcggacattttttctttgaccttcgcttcgaaacgccacgtggcatatacgtataaccccagtccggccacgatgcaccagaccatgatctgaaagaataaaaccatattcgaatccctcacatttgaaataggttctgcttattgtattcgagagatccggatggttttcctgttccatcaaaaaaaccgctcctttgacagaagcggtgtgacattaaaatatcatatttaaaataaagtaggcgatggcaccaagtgtcgctgaaatcggaagcgtgatgacccatgtaatgagcattcgcttggccgtaccccagtttacaccttttacgcggtgggacgcaccgacgccaagaattgatgaagaaatgacgtgggttgtactgaccggcaaatgaataaacgtggcgccgaaaataatggctgctccggttaagtcagcggaaacaccgtttaccggacggattttcatgatctttccgccaacggttttgatgattttccagccgccgattgatgttccgagacccatggctgtcgcgcaggcgaattgtacccaggtaggaatatcattagcagaagtatgtaaattcgctgtgatgagagccattgtgataattcccattgctttttgcgcatcgtttgttccgtgtgtatacgattgcagggcagctgttacaatctgcactctgcggaattgcttattcgttttcgccaagttgctgtctttgaaaatcagcttaacgatgctataaagaataaaaccaaggacaaaggcaataattggtgataggatcagtgcttcaatgattttaatgaagcccttatagtttaacgctgcaaatccggctgccgcaatggctgcaccggcaatagcgccgatgatggcatgggatgagctgcttgggataccgtagtaccatgtgataaggttccaggcaattgcagcgagtagcgcagccaaaatgacaacagagccattttccagcgtataaggatctacgatgtctttcgtaatggttttggcaacacctgtaaacgtcattgctccgacaaagttcatcacagccgccaatataatggcatggcgcggttttaacgcttttgttgataccgaagtcgcaattgcgtttgccgtatcatgaaacccgttgatgaaatcaaacgccagagcacaaatgactattagtatcgttaatattaatagaatatccatttttacccctcgttacgcgtttttcataatgatggtttcaagattattggcaacactttgacaagagtcggcgatttcttcaagcgtttcgtatatttcacgatattgaatgactttgattggatctgtttcatttccgaaaagattctttaatgattttctgtgcaagttgtcacagctgtgctcatactctttaattttgattgcgtgaggctgaatatcctttaagcgattttctgccagcagctcgatcgtaatcaaaatctctttcgcacattctctgatatatccgctgaatttatcaatatgctcgtctgatgaagtaattgagaaaatctccatcatggcagagaaatgttcgattccgtcaagcacatcatccaagctgtttgtcagctgaaggatatcttcgcgctcaataggagtgatgaacgctttgttaagctctttaatcatgacatgaacatgattgtcaccttttgtttcatattcctttaacgtatctgcaaattctttaagagtcgtttggttagtgaccttaaaattcacaaaatattctgcagtttcgtctatgttctttgcaatttctgttaaaaggagtgagaacttatctttttttcttcttatcattaaaaaccctccatagtttgaatgaacaatgcacacatcaaattattatatagccttttgtcgaaaaaaaacaggtaaagtcgaaaaaaacgtatcttgacttttttgataaatcgtgtctccttattttgacctacttcgctttaaaaaaacgacccaagtttgcaaaaactttctgcttaacgtaaaaagtatatcaaaagttgtgtttttcctgtcaacttttatcttctgtttcaccaaaaaacggttccctaaacaagggaaccgttttatcagcttgcttttcgttttttcatcccgtaatagacaggcagcccggcaaggccgatgaggatggataatccgcagctcattgtatctgtaatgagtgtgctgcctagcacaaagaaggagcccgcgattgccagaattggcatagatggataaagcggaacactgtaggcgcgcttttttccctttgctcgcttgcggagaataaacactgcaaaaaaggccatcacataaaaaatgtagatcatgaaaatggagatttctgagagcttatcagggttgctgatcagcatcataatcaaagccaaagcaatttgaaaagaaatcgcaatccatggtgtgcggaacgacgggtgcacatgtgacagtttttcagcaaatggaagctgtttgcgttccgccattgcaaatgaaacacgcgggaaagaaagcacctttccatttaagcacccaaagatgctgacgataatccctacactgatcagctttccgccaattgacccgaacagcatggttgccgcggtgcttgtcgcattttcaccaagcgtgacaatttcgttcgctgacaggatgtggagcaatgcaaaattaatgaaaatatagatcgctgttacaattaataatccgcccgtcatagcgcgtggcagcagcttttcgggatttttcatttctccgccgagagcggcaaggagaatccatccgtcataagcaaacaacgtagctaaaatagccgccccgaagttcatatcggaaatgctttcgtttactgctgtgaagatgtgctgatcgcctttccaaaggccaaagatgatgatgcaggcaatcggaatcagttttccgatcgttgtcagcgtttggacaaaaccgccatattttgtaccaataatattaatgacgcataaaaagagaactgctatgattccaatgacttttgatagtccagatccccagccgaaaagattcgccattaaagatccaaaatataaacccagcgcgccaataatcgccgggccgtaaatgataatctgcacccagccgcacaaaaatccccaaaactcgccgtacacttcttcaaggtacgtataaagaccgccggtttttggaatctgcgttccgatttccgcgattgtcaaaccgcccgccagtgttaaaataccgcctaacagccaggcgaaaagcgctgtttttgaatcacctgaataagcaagcacagcgccgggcttcataaaaacaccagaaccgataatggttccgatgacaagagtaagggcaaacaagaggcctatctcttttttcaaaccgttgtcttcagtatgcatgtccttaacctcctatgatgttgaagcttcatgttgaagaatctattttttcatattgtaaaccctattttagaaaagtgaaataaaataaattttctgattttcgaaatttgctttgtgtacagcaaataaaactgtaaaaacgcttgttttaacaatctataaacgaataaacttcatgatttttatttgcaaagttcgtgttttctgtattaggattttagccggtacggaggggagaattcagaaaatgaacgaaccttcggtgaagctgatatgttgactttctcatgcgaataaaatactttgttattagaacaataaatatacaactatgatatgatatctcgaaatcgagataaaataacctggagggacagcgtatgaaagttaacggcattcaccacgtatcggcattaacggccgacgcacaaaaaaacttggatttctataagaaagtattaggattaaagctcgtcaaaaaatccgtcaatcaggatgaaccgacaatgtaccatctgttctacggagatgaagtggcaaacccgggaactgagctgacgtttttcgagattccccgcattgcaccgtttcatgcgggaacaaacagtatttcttctattggattgcgcgttccaagcacagaagccctgcattactggaaagaacgttttgaagcgcagcaagtaacgcacagcggtatatccaaaagagctggacgtgacatattggcatttcaagatcatgaagggcagcgacttgtgctgactgctgatgaggaaggaaaaggatatggcctgcctgttaaacagagcggcattccggaaaaattttcgtttcgcgggttagggccggttgaactgactgtgccatatgctgaaccaactttacacgtattgacgaatattcttggatttacagaaatcagccgtgaaccagtcgaagggcaaggaaccgccgttattctggaatcaggagaaggcggtgctgcaacggaaatccatttaatagaaagaaacgatcttccgcgcgagcgtcaaggcaaagggagtgttcaccacgtcgcatttcgggtaagagatgaagaagaacttgccgggtggcaccggatcatcagccgcgaaggctttagcaattcaggcatagttgagcgctactatttcaaggcgctgtatttcagagaaccgaacggcattttgttcgagttatcaacagacggaccgggctttatggtagatgaaaatcttgatgagcttggccaaacgatcgctcttccgccatatcttgagcatcgaagagctgaaattgaagcgaaattgaaaccgatccaataaattgtgattcatttgccctccggcgcgccggagggcttttttattttgggaaaacgcatcgccgattacgatttggagaaagggctagaaaccagctgtatataggatgattggcatgaaatggcctcggcaaaaatattgtctttgtttattaatagtttattcatatttgcttgttacactatttccaagttagccaaaaggagtgaaaaacacgtggaaaagaaaaaacgcgagctggatattttcctcatcctcattttgctcgcatctgcattcttaaatatctataacatctggaatgatgatacggtgaatccttattacaccgctgcagtcacaagtatgatgcaaagctttcataattttttctatgcctcattcgacgcggcggggtttataacggttgataaaccgcctattacgttccagatacaaaccatcagcgcacttatattcggtatgcacggctggagcgtcatcctgcctcaggcacttgctggtgtaggttctgtccttttaatgtatctgttaataaaaccgacattcggtaagacagcagcaagaattgcctctttcatcatggcatgtacaccgattgctgtagctgtagcacgtacaaacaatgttgatgcattactggtatttttcttattgcttgctacatggcttctctttaaagcgatcagaaaaggaaagctgatctggctgttagcagcatttttcgttgttggagtaggatttaatacaaaaatgctgcaggcttacatgattttaccggctttcttattgttctatctgattgcggcaaacgccacaatcaagaaaaaaatcgtttcattggtaagtgcgttagccgtattagcagccgtttcgttatcgtggccgctcattgtcgacaatatccctgcaagcaagcggccttatatcggaagcagccaaaccaactctgttttggaattggctttcggctataacggaatccagcggctgacaggccaaaattcaggcggcggccagggtgcgccaaacaaagacgcttcaaaagaaatgtcttcttctgataacactcaagcaccgcctaatcagtcatcaagcaacagctcatcaagcgatggtaaatcctcaaatggcaatatggcggcgcctccatccaatggccaaatgccaagcggcggtcaaggaggccctccaagcggcggagatggcggccaaggcggacccggcggagacggagggaaaggcggtacaggaactggttcgaaaatgcaatcaggttcagggatgtttggaacgggaacacctggtccactgcggcttttccaacaagagttatctgatcaaatcagctggcttctgccatttgcgatatttggaatcgcaggcttactgatcgctggcgcgagagaaagaagaagattatctatagagcagaaggaaacggtgttctgggttgcgtggcttgtaccgattgccggattcttcagtgtcgcagaatttttccatcattattatctcatcatgctggcaccgccgattgcggctcttgtcggtgcggggtgggttgctcttgttcatctgtaccgcaatcagacaggctggaaagcatggcttttgccgggagcaattattgcgacaactggatttgaattgtttattctcagaaactacaacgatcaaatcggtgcaggctggagcatcggtgtaggtattatcggcgcattgtcagcgattgctttgctgctgtttaaacagcgccaaaaaccgttcagttattatgtttcacttgcagctctcctcgcattgctggtgatgccagtttattgggcaagtacgccacttctgtacggaggcaacagctcactgcctgaaacaggccctcagctcgcatcaatgggcggaaaaggcatgggaatgtctgatgcgactgtaaatgaaaaactgatcaaatatctagaggagaataactccggagctgaatacctatttgccacaaccgattcgaacacagcggcaccatatatcattaaaacgaaaaaagctgtcatggctattggcggatacagcggttctgacccggcgatcacactgactcaattcaaaaaacttgtaaaagaaggaaaagtgaaatacttcttggcttctggaatgggaagaggcggaaacaatgacattgttgaatgggttgagaaaaatggaaaagaagtagcatcagaaaaatggcaatcaagttctgatcaaaaaacagaaaatactgattcggctgatacatcaagcagcaaggcttcaggtgaaaacggcaaaatgggcggacctggcggaatgaatcagtcagcaacattatacgaactacatgctgataaataggaggcaaaaacatgagcagacatattcaatattcaattgttgtacctgtgtataatgaagagcttgtcattcatgaaacctatcagcgcttaaaagaggtcatggatcaaacgaaggaaaactacgagctgctttttgtcaacgatggcagtaaagaccgcagtattgagattttaagagagcacagcctgatcgatccgagagtgaaaattattgatttttcaaggaattttggacaccagatcgccattacggcgggtatggattatgcacaggggaatgcaatcgtcgtcattgacgccgatttgcaggaccctcctgaactgattttagatatgattgaaaagtggaaggaaggctatgaggtcgtgtacgccgtgcggactaaacgaaaaggggaaacctttttcaaaaaacaaaccgcggctatgttttaccggcttctcagcggtatgacagatattgatatcccgattgatacgggggattttcgtctcatggacagaaaagtctgtgatgaaatgaagagattaaaagaaaaaaatccatttgtcagagggctagtcagctgggtgggctttaaacagacagcggtcgagtatgtacgtgatgaaaggcttgccggagaaacaaagtacccgctcaagaaaatgctgaagctgtcaatggacggcatcacgacattttcacataaaccgctgaagctggcaagctatgcggggattttaatgtcaggtgctggatttctgtatatgtttatcgtgctgtatctgaagctattcacagacagcacgattaccggctggtcatcacttattgtgatccagctcctgttcagcggcattgtccttctgattttgggcgtgatcggcgaatatatcggcagaatctacgatgaagccaaagacaggccgctttacatcgtccaaaaatcgtatggaattgaaaataaaagactctatagagaccagcatatgtcataacctcaaaccccctgtccgtaatggacaggggtttttatgctctgagcccgatctaaagcaaaagatgctgatagatatatggaaattgggtaaagaagagattgtgagcttgtactgcggttcagtcatgccgaaataaaaacagcaaaacttaaagatttcgtcatcggctttgctgcatgtcagctgttatattggggggcttttaagaaacgcatgattagagccgtaccagttatgtttaatagaatactggtacccaatacaattccccacgtcaacgtcgattcagagagaagaaagctcagtaaaagaaaagccaatcctgcgcagatcatactcagtcccacggttttcatgttcatgcctcctagcaaacgatgtttctagcatctgatgtgaatgatgtcaatctgtatgatatacggatatctcgtcagaaagtttcatagagcaattaggtcttttatctaataaaaagcctcagaccgcttttacggcctgaggcattatgtcttacgaagttttctcttctttttgatccagtttaatttttttcgtcatttctttgccgtttcggagaattttcacttcaacggtatcaccgatctttgcgtctttatataagatattgcgcaattcactgcctgtatcaatttctttaccttttaggccgatgataatatcctccgcttttaatccggccttttcagcaggagagcctgaagcgacctcacggatgtaaacacctttattcagctggctgccgaacaggccgagtgtgccttcttggtaattttgcggcacttgttctagatcaagcatgctgacaccgatatatggacgttcaatttgtcctttagacagtaattcttcagcaatcggttttacgtcattgcttggaatggcaaatccgataccctcaacatcatcttcactgattttcatactgttaatgccgacgattttgccgtctgtatttaacaaaggaccgccgctgttacctggattaattgctgcgtctgtctgaatgacgttaatgctcgtttcgccggctgatgtagacattgaaaccgttctgtccacgccgcttacaattccttgtgttactgtgcgggacaggtcttttccaagcggatccccaatcgcaataacggtctcgcctgttctaagatcagatgaatcaccgaagtttgccacttttgtgacgtggtcatcactgatttggaggacggctaaatcagttaacgagtcactgcctaccagctttgcagtaacctcagtgccgtcatataaagataccttcagtgatgatgccccttctacgacgtggttatttgtaatgatataagccttgccattctcttttttgaaaatgacacctgaccctgaaccgctttctgtatcttcgctggaatcagaagaactagagccgaacaaagagctgtttgattgtgcctgaagatttgtaataccgacaatcgctggtgaaaggtcttctaccatatctgagattttagaagagtcctcgctcttgaatgcagatgagctgcttgagctttttttagattcagaggaggtgcttgttgctgtaacagattgcgtttgctgctggctggatgattgttttgcagtgtcctgagaatcatggtcgccaagcggtgtaaacgtgtaaatgccaagggcaagactgccgccgatcactccgccaagcaacggtctgaaccatccgaagcctcgttttttcttctcctgatcatgaatgacattgcgggccgagtaggaggtgctctgatcgttctctttcgttaaaaagacctcattctcattacctttcgttctgttttcatcacgatagttatccatcatgttcactccgtttctctattttcacatgtctatttatattgataggtttatgacttgagtttatcataaacaaaaactgtgggataaaaatgaaaagattatgggaaattgtgaaaaagtgcggaaaacggtacacttcatattgtatatgaaaggactgagtcgatggaacagattggattgattggatatggcagcatggcggatatgatcgccagacagctgttgaaacatgaacaaataaaagagaatgagctatttattgagacgagaacgaagggggagcggctgcgggcactcatgtcagattatccaaacgtatcggctgatccgttggagaattgggcaaatacgtgccaattgattttgatatgcgtcccgccgctccatgtcatcgaaacaatgcgccgtctgcacccgtatgtgaacagaaatactcacatcgtatccatagctgccggtgtgccgctgcgtcttttggaggcagaaacagaagccggtatctcacgtgttattcctgccattacgtccgaagcagaagctggcatctcacttgtcgttcacagtgaagcactggctgcagagaaaaaagaatatctgaatgaattgttatcggttttcagccgtgtacgagaaatcaaagaatcgaatttagatgcggccagcaatttaacgagctcggcaccaggattcatagccgcaatctttgaagaactggcactgtctgccgtcagaaacagcagcctgtccaaagaagaagcctttgattttctgattcattcgctatacggaactggcaagatgctgatcgaaaaaaatatgtctttcgaggagacgctggaacgtgttgcaaccaaaggcggaataacgggagagggagctgaggtgatacgcgcctctgtgccggacgtttttgatgaggtgtttgaaagaaccctgaaaaaatatgaactgcttacagaacaggttggtaaacagacatgaatccttgaaagaggattcttttttattactgaatggttgagattttccccagttatattgcatttttcctctttttttaatataatctgttagaatattcataatttagtaaaaaaggaggagcgttatgaaattgtacatgtcagtagatatggaaggtatttcgggtcttccggacgatacctttgtggattccggcaagcggaattatgaacgcggacggcttatcatgactgaagaagcaaactactgtattgctgaagcgtttaacagcgggtgtaccgaggtgctggtcaatgacagtcattcgaagatgaataatctgatggttgaaaagcttcaccctgaagcagacttgatttctggtgacgtcaaaccattttcaatggtggagggactggatgatacgtttacaggcgctttgtttctcggttatcatgcgagagcctcgactcccggtgtcatgtcacacagcatgattttcggcgtccgtcatttttacataaacgatcggcctgtcggtgagcttggattaaatgcatacgttgccggttattatgatgtcccggtattaatggtagccggggatgaccgggcggcgaaggaagcggaagagcttatcccgaacgtgacgacagccgcagtcaaacaaaccatttcaagatccgcagtgaagtgcttgtcccctgcgaaagccggacggctgttgacagaaaaaactgcgtttgccctgcaaaacaaggacaaagtcaagccgctcacaccgcctgacaggccagttctgagcattgaattcgccaattatggccaagcagaatgggcgaatctgatgccgggaacggaaatcaagacgggaactacaaccgttcaatttcaggcgaaggacatgcttgaagcctatcaggcgatgcttgtcatgactgagcttgcgatgcggacatcattctgctaaaggggtgttttaggctttggcgcgatacatgataaagcgtttttgggcaatggcagctacgattttggtgattaccaccctgacttttgttctcatgaaggtcattcccggatctccttttaacgaggagagaggcacaaatgaagccgttcaaaaaaatctcgaagcctactatcacttagacgatcctctcattttccaatacattttctacttaaaatccatcattacattcgatttcggaccttcaattaaaaaaccgtcggacagcgtaaatgatatgctggaacgcggatttcccgtttcctttgagcttgggatgacagcgattgtcattgctgtgatttctgggctggtgctgggcgtaatcgctgcactccgccgcaatggctttttggactacgccgcgatgagtcttgcagtactcggcatctccatcccgaattttattctggcaacattgctcattcagcaatttgctgtcaatctcaaactatttcctgctgcgacatggacgagcccgattcatatggtgcttccgaccgcagcgcttgctgtagggccaatggcgatcattgccaggctgacacggtcgagcatggtcgaagttctgacacaggattatatccgcacagcaaaagcaaaagggctttctccattcaaaattatcgtaaaacacgcactcagaaatgcactcatgcccgtcattaccgtcctgggcacactcgtcgccagcatcttaacaggaagctttgtcattgaaaaaatctttgccattccgggaatgggaaaatattttgttgaaagcattaatcagcgggactatcccgtgattatgggaacgaccgttttttacagcgtcattctgattatcatgctgtttttggtcgatttggcctacggtctcttagacccgcgcattaaactgcataagaaagggtgaagcgtgtgaatctccctgtacaaacggatgaacgccagccagaacagcacaatcaggtgcctgatgagtggtttgtcttgaatcaggaaaaaaatcgggaagccgattcggtcaagcggacgagtttgtcatacacgcaggatgcctggaggaggctgaaaaaaaataaattagcgatggccggactctttattcttttatttctttttgtcatggcagttatcgggccctttttatcgccccatagtgtcgtacgccaatcgctgacagaacaaaatcttccgccctcagccgatcattggttcggcaccgatgaactcggccgggatgtgtttacccgaacatggtatggcgcgaggatctcgttgtttgtcggcgtgatggcagcactgattgattttttgatcggtgtcatttacggaggcgttgccggctataaaggcggcagggttgacagcattatgatgcggattatcgaagtactgtacggcctgccgtacctgcttgttgtcattttgctgatggtgctcatgggaccgggactgggcacgattattgtggcgctgactgtgaccgggtgggtcggcatggcgagaattgtaagaggccaggtgcttcagattaaaaattatgaatatgtactcgcctcgaaaacctttggcgcgaaaacctttcgcatcatccgaaagaatttgctgccgaatactatgggggcgatcatcgtacaaatgacattaaccgtacctgccgccatattcgcagaatcatttttaagctttctcggcctcggcatacaggctccgtttgcaagttggggcgtgatggcgaatgacggcctgcccacgattttatctgggcattggtggcgcctgttttttccggcctttttcatatctctgacgatgtacgcgtttaatgtgctgggggacggattgcaggatgcgcttgaccctaagctgaggaggtagctgtatggaaaaagttctgtcagtccaaaatctgcacgtgtcttttacgacttacggcgggacggttcaggcggtcagaggggtgagctttgatttgtataaaggagaaacctttgcgatcgtcggcgaatccggctgcggcaaaagcgttacctcccaaagcatcatgggcctgcttccgccttattcggcgaaggtgacagacggcagcattctatttaaaaacaaagacctttgccgtctctctgacaaagaaatgagaggtataaggggagccgacatttctatgatttttcaagacccgatgacggcgttaaaccctacgctgactgtcggcgaccagctgggggaagcgctattgcgccacaaaaaaatgagcaaaaaagcggcacggaaagaggtgctttccatgctgtcattggttggtattccagatcccgaagagcgcctaaagcaatatccccaccaattcagcggcggcatgagacagcggattgtcattgcgatggcgctgatttgcgagcctgacatcttaattgcggatgaaccgaccaccgccctggatgtaaccattcaggcacagattttagagctgtttaaagagattcagagaaaaacgaatgtgtctgtcatcctgattacacatgatttaggggtcgttgcccaggtagctgacagagtcgcagtcatgtatgccgggaaaatggcggaaatcggcacgagaaaagatattttttatcagccgcagcacccttatacaaaaggactgctggcttctgtcccgcggctggatttagatggagcggagctgatcccgatcgacggaacgccgccggatttattttcgcctccgccgggctgcccgtttgccgcccgctgtccgaacaggatggttgtgtgtgacagggtgtacccgggccagacgatcagatctgactcgcacaccgtcaactgctggctgcaggatcaacgagcagagcatgcggtgctgtcaggagatgcgaaggattgaacatgaaaagggggaagaggatgaaacgagtgaaaaagctatggggcatgggtcttgcattaggactttcgtttgcgctgatggggtgcacagcaaatgaacaggccggaaaagaaggcagtcatgacaaggcaaaaaccagcggagaaaaggtgctgtatgtaaataatgaaaatgaaccgacttcattcgatccgccgatcggctttaataatgtgtcatggcagccgttaaataacatcatggaggggctgacgcgtcttggcaaagatcatgagcccgagccggcaatggcggagaaatggtctgtttcgaaagataataaaacttacacatttacgattcgggaaaatgcgaaatggacaaacggagatcctgtaacagccggagacttcgaatacgcgtggaagcggatgcttgatccgaaaaaaggcgcttcatcggcattcctaggttattttattgaaggcggcgaagcatataacagcgggaaagggaaaaaagacgatgtgaaggtgacggcaaaggatgatcgaacccttgaagttacactggaagcaccgcaaaaatattttctgagcgttgtgtccaatcctgcgtattttccggtaaatgaaaaggtcgataaagacaatccgaagtggtttgctgaggcagatacatttgtcggaaacggcccgtttaagctgacggaatggaagcatgatgacagcatcacaatggagaaaagcgacacgtattgggataaagatacagtgaagcttgataaggtgaaatgggcgatggtcagtgacagaaatacagattaccagatgtttcaatcaggggaacttgataccgcttatgtccctgctgagctgagtgatcagctgcttgatcaggataacgtcaatattgttgaccaggcgggtctctatttctatcgatttaatgtcaacatggagccattccaaaatgaaaacatcagaaaagcctttgcgatggctgtggatcaagaggaaattgtaaagtacgtcacgaaaaataatgaaaaaccggcgcgcgcctttgtatcgcctgggtttacgcagcctgacggcaaagatttccgtgaagcaggcggagacttgatcaagcctaacgaaagcaaagcgaagcagctgctagaaaagggcatgaaggaagaaaactataataagcttcctgcgatcacgcttacttacagcacaaagccggagcataaaaaggttgccgaagctattcagcaaaaattgaaaaatagccttggagtcgatgtaaagctggccaatatggaatggaacgtatttttagaggatcaaaaagcgctgaaattccaattctctcaaagctcatttttgcctgattatgcggaccctatcagttttctggaagcctttcaaacgggtaattcgatgaaccgcacaggctgggccaataaagaatacgatcagctgatcaaacaggcgaaaaatgaagccgatgaaaaaacacggttctctcttatgcatcaagctgaagagctgctcatcaatgaagcgccgatcatcccggtttatttttataatcaggttcacctgcaaaatgaacaagtaaagggaattgtccgtcaccctgtcggctatatcgacttaaaatgggcagataaaaactgatggcggtgattgaggaaatactgcttctttatgcgaaggagcggtattttttctctttcttgcacgtatacgtagggtgcagagcaaatgaaaggagtgttttcgttgaattacaagccgaaagcgttgaacaagggtgatacagtcggagtgatcgcgcccgcaagtccgccggatccaaaaaagcttgacaccgcgcttttatttttagaagagctcggtcttcaggtgaagttgggcaaggcgctgaaaaaccagcacggctatttagcgggacaggatgatgagcggctggcggatctccatgagatgttcagagacgatgaggtaaaagcagtgttgtgcgcatgcgggggttttgggacaggacgtatcgccgcgggcattgatttcagcttgatccgcaaacaccctaaaatcttttggggatacagcgatattacgtttttacatactgccattcatcaaaacacaggtcttgtcactttccatggcccgatgctcagcacggatattggccttgacgacgttcacccgctgacaaaagcgtcatataagcagctcttccaggagacggaattcacctatacagaagagctttctccgctgaccgagcttgttcctggaaaagcggaaggcgagcttgtcgggggaaatctgtctttgctgacgtctacactgggcacgccatttgaaattgatacgagaggaaagcttctgtttattgaagatattgacgaggagccttatcaaatcgaccggatgctgaatcagctgaaaatgggggggaagctgacggacgcggcgggaattctagtttgtgattttcacaattgtgtcccggtgaagcgagagaagtctctctcgcttgagcaggtgctggaagactatattatttctgcgggcaggcctgctctgagaggatttaaaatcggccactgctcgccaagtattgccgttccgatcggtgcgaaagctgctatgaatacagcagaaaaaacagccgtaatagaggcgggcgtttcagaaggggcgctgaagacatgaaaatcattcgaatcgaaacaagccgaatcgccgttccgctgacaaagccgtttaaaaccgcacttcgcactgtgtatacggctgaatcagtcatagtaaggattacttatgacagcggtgcagtcggatggggagaagcacccccgacgttagtgattacaggagacagcatggatagcattgaaagtgccatccaccatgtgttgaagccggcattgcttggaaaaagcctggcgggctatgaggccattctgcacgacatccagcatcttcttacaggaaatatgagcgcgaaggctgctgtagaaatggctctatacgacggctgggcgcagatgtgcgggctgccgctttatcaaatgcttggcggatatcgagatacgctggaaacagattatactgtcagtgtcaactcacctgaagagatggcagctgatgccgagaattatctcaaacaaggctttcaaacgctgaaaataaaggtcggaaaagatgatattgcaacagatatcgcccgtatccaggaaatcagaaaacgtgtcggatcagctgtgaaactgcgtttagacgctaatcaggggtggaggccgaaggaagcggtaactgccattcggaaaatggaggatgcgggcctaggcattgagcttgtcgagcagcctgtccataaagatgatctcgctgggcttaaaaaggtgacagatgcaacagatacgccgattatggctgatgaaagtgtttttacaccgcgccaggcgttcgaagttctgcaaacccggagcgcagacttgatcaatattaaattgatgaaagcgggcggcatcagcggagcagagaaaattaatgccatggcggaggcctgcggggtggagtgtatggtcggcagcatgatcgaaacgaagctgggcattacggccgcggcgcattttgcggcaagcaagagaaacatcacacgctttgattttgacgcgccgctgatgctgaaaacagatgtattcaatggcggcataacatatagcggcagcacgatttcgatgcctggcaaaccgggcctcggaatcatcggggctgcgcttttgaaaggggaaaaagagcaatgatgcacactgtcatatcagcagtggccaacatctggacagcgcctgattcacctcgtccgtctgatcaattcatgcttcaaccgactgtaatgatcagagactggctggagcgcatgacgtatgatgaacggcttggattatgtacagacaatgtaatccaaactcaggttctctttggcgaaaaggtacttgtgacggcggaacagggggaatgggtttctgtgatcgtgcctagccagccatcccgaaaggatccgcgcggatacccgggctggatgaaaaagtaccagctggaaaaaacaaagcccatccatacacaacacgatgtgatgatcagcaaacctgctgcctttttgtacagaagcaatggggaaaaggagatcgaattaagctttttgacagttctgccccttattgcaaaagaaaacggatattttaaggtttcgaccgtttttggggaaaggtttgtgaggcaaagtgatgcagtgcctgtcagccaacagaaagggactgctgaagacatcattcaaacgggtgcgttttttcttggccttccctacctgtggggagggatcagcgggtttgggtttgattgctccggatttatgtacagtatatttaaggcgaatggatacagcatcccccgtgatgcgggagatcaggctaaggcagggaagggtgtcccgcttgatgatatgaaagccggtgatctgctgttttttgcttatgaggaaggaaaaggagcgattcatcacgtcggtctgtatgtaggcggcgggaaaatgcttcattctccaaagacagggaagtcaatcgaaatcctcacattaacagagacaatctatgaaaaagaattatgtgcggtgcgccgctgtttttcagaataaggagggagacaaatgacgccactgcctttgttagaggtcagccagctaaaaatgcattttgacgcagggaaaaagcggacagtcaaagccgtcgacggggtcacctttcagattcgtgaaggagaaacgttcgggctagtcggggaatcagggtgcgggaaatcaaccttggggagagtgctgatgcgcctttatcagccgacagaaggaagcgtgacataccgcggcacaaatcttcatgcactgagtgaaaaagagcagtttgccttcaaccgcaaactgcagatgatttttcaggacccttatgcttcacttaacccgcgcatgaccgttcgagaaattattttggagccgatggagattcacaatctctacaatacccataaagcgcggcttctcgtcgtggacgagctgcttgaggcagttgggcttcaccccgattttggcagccgttatccgcatgaattcagcggcgggcaaaggcaaagaatcgggattgcgagagcactgtcgctgaatcctgaatttatcgtggcggacgaaccgatttctgctcttgatgtctctgttcaagcgcaggtggttaacctgctgaagcggcttcaaaaagagaaagggctaacgtttttattcattgcccatgatctttcgatggtgaagcatatcagtgacaggatcggtgttatgtacttaggacacatgatggaaattacagagagcggcaccttgtatcgtgaaccgctccatccctatacaaaggcgcttttgtcctcgattccgattccggatcccgaattggaggacaagcgtgagcgtattctcttgaaaggggagctgccgagcccagtgaatccgccgagcggctgcgtgtttcgtacccgttgtccggaggcgatgcctgaatgtggagaatctcgtccccagcttcaagaaatcgaacccggccgttttgtcgcttgccatctgtatcgaaatgctgaaacgaaggaaaaagtgagataaataaaaagagtggctcctttttactagagccactccatttgtttatacttgatgtaaaaactttacacaaaccgggtaagggacagaaaccgttgatgggaggagtgtcaatcggccggtttctttgtctctttcaaacaagacaaggttgcctgtttcttcatttgaagcaacgaggaacccttccgttgggtcaaatacaaagtcacgaggccagtttccttctgtcgacactctttctacgaaagccagctctcctgaatattgattcacttcaaatacggcgatactgtcatggccgcggtttgcgacataaacaaaacgtccgtcctgcgtgacatgaattgcgcttccctggctgttatctgtaaaatcatcagggatggcagaaacgacttggatttctctaaattcgccggctgtcgggttgtattcaagcgcaatcacttcattgcttaattctgtcatgacataagcgtatttttctttcggatgaaaagcgatatggcgaggtcctgcaccgggagcgaaggaatggcttccggattcagtcaacacaccgtctttaagcttataggtgtagagcttatctatacctaaatcaaccgctaccacataattgtgttcaggtgtgaaccccgcgtagtgtgtatgcggtttttcttgtctttcgtgcggcccttttcctgtgtgagcggcctctgaaacaggtgattgcaagctgccgtcttcctgaaccggaaaaacgtgtaccttcccgctgtgataattggcagtcaggacgaattgattttgatcatcaatgcttacgtggcatggcgaagggccatcaattaactgatgattcagaaatgtcaattcgccgctgtttttatcgatttgataggcagcaactccgccttggccgtctgctttttcgatggaataaaggatggtgttgtttttattcggcgccacatatgtcgggttgcccagcttagcggccagctttggctcgctgagtgcttttttctcagtatcaagctcaaatgaataaattccttcgcttccgccttttgtatatgttcccacatatcctatgtattttgtcatgcgatttcccccttaaaaatgatgtcacctctatattaacgtatcttgataaaataagctgttcaaaacatgaaaaaggggaagattcttcattcgcctcgaatcagcggcattgtgcagcacctgaaggagccgcctgatttaataatttctgacaggtcaatttcgataatgtgatagcctcttttcgatagctgttgattgacatggcggttgccagggagactgatgatcgtttttttttcgattgaaaggacgttggtgccaagcgtaaattgttcgtcctcgggcacctcaataagatcataacgttttgccagcatatcggctgcaactggctcaatggcctgtggataaattaacgcttcgctttcagatataatgttaaatacgcagtccaaatgcaaaaatttttcatgaagcttcactggaacgatcgtatattcaggaagtgcctcttccagctggccgatagctgaaatgtcggtgcgctggctgattccgacatagacaatgtcatcatcgataatgacgtctccgccttcaatactcgtatcaagcatgcgggtgtaagagataccttggctgtgaaaaaaatcttttataacggcttcttctccttggcgaatcggttcagtcatgcttgacagaaaggctttttctccgatgacaaatcctatgtccctagtaaaaacctgctctggtagtccgtcgcgaacgggcaaaaggacgacctcaacgttgtgtgacctaagtgcctccactaagcggctgtgctggtcgttagcggtttttacatgaatattgtcatcttcaaaatgtttttgtgtttcgtttataacatcttttatggtcatgtgctcaggtttgcataagatcactttctgaagtgtgccgtattccgttcggcataccgttttgtgctgagatttcgggatggatacgtccatttgtttttcctcctaaagtgtgaagaatacatttattattccctcatcatgaaaatcattaaaccattttaaattttagacaaatggaagagaatattgtttaataggagaatataagtgcatttagctaaaagatcagacatcaaaggggagaaaggtatggaaacaccggaaacaagattttgtaaagagtcaaaggttgtgaaaaccagcagggtgttcccgcttgacacgaacaaccataatacgctgtttggcggaaaattaatgagctacatagacgacattgcctctatttcagcggcgcgccattgcagacgtgaaacggtaacagcttcaatggattctgtagattttttaaagccgatcgggcaaaaggattctgtctgcctagagtcatatgtgacatgggtcggcacatcttccatggaagtatttgtgaaagttattaaggagcatttgatgactggcgaacgggaactcgctgccacatcctttttgacatttgtcgcattagattcaaatggcaagccggtgcctgtaccgagggttgtaccggaaacagaagaagaaatcatgctgcataatacagctgtacagcgtgctaatgaacgtaagaaccgcaagaaacacagccaggcgcttgcgaatgcgcttggaactgataagccttggtgaacgttaaacccaaaacataagttgttttgggttttttttttgtacttttcaatggtgattattgcaatggttagtccgtttttgctaggggattctataaaaaagcaacaaatgtcatgttaaattgataattttgtgacaactttattaaagattcattttagatatatcttttattcgtaagatcatgtattttaaagatatattatgaatacatcttttcgaaaggattgtttataaaatgttagataacaaaacaatcgaaattattaaaagcactgtacccgtattgcaacagcatggagaaacaatcactggccgtttttacgatcggatgtttcaagaccatccagagcttttgaacatttttaatcaaacaaaccaaaagaaaaaaacacagcgaactgcactggcaaatgccgttattgcagctgcggcaaacattgaccaattaggaaacatcattccggttgtcaaacaaatcggccacaagcaccgcagtatcggaattaagcctgagcactacccaatcgtcggtaaatatttgctgattgcgattaaagatgtattgggagacgctgcaacccctgacattatgcaggcatgggagaaagcgtacggagtcattgctgacgcgttcatcggaattgaaaaagacatgtatgaacaggcggaagagcaagccggcggctggaaagagtataagccattcgttatcgcaaaaaaagagcgggaaagcaaagaaattacatccttctatttgaaaacggaagacggcaagccgttacctgaattccaagcagggcaatatatcagcatcaaagtgcggattcctgattctgaatatacgcatatccgccagtacagcctgtctgatatgccgggaaaagactattatcgaatttccgtgaaaaaggatggtgtcgtgtcttcctacttacacgatgggctgcaggagggagattcaatagagatcagcgcaccggcaggggactttgttttagatcatgcatcacaaaaagatctcgttttgatcagtgccggagttggcattacaccaatgatcagcatgctgaaaacatctgtttccaaacagcctgaacggcaaattctgttcattcatgcggcgaaaaacagtgaatatcatgcattgcgccatgaagtagaagaagcagcaaaacattctgctgttaaaacagcatttgtgtatcgcgagccgacagaggaagaccgtgcaggtgatctgcattttcatgaaggacagattgatcagcaattcctcaaagaactgattgccaacacagatgcggattactatatttgcggttcaccgtcgtttattacggcaatgcataagcttgtatcagagctcggaacagcgccggagtctatccattacgagctattcggcccgcaattaagtttggcgcagtccgtttgaacacatacatgaaactcttctcctttcagagaagagttttttattgagatataagaaggcagacaagcgccggtttctacatccggacaatcacagacccttgccatttgtgcatacacggttttgctgttcttgcattgttttcagcaattcattgtttacctcaatcgctctaattagttgctccatccttagctccaaaccggccagcctgtcgattgtttgctgctggtagctctcgggttggggagccaaaggcagatcaaagggccaaagggtattcgacttctgatttttcatattgcgtattgcgcctccaatcggtgtcactttctattatgttatgttcaggcgatatgcacgttcgcctagacactgatgcatagagggcctgccacggggtacaataggctcaatatgaccagcggatggaggtaaagatcggtgttatggatggtatgggtatttttactgaagccagttatcgtattttcgattgcatatattttgtttcggcttgccggtaaaaaagctgtgtcacaaatgaacaattttgacctgcttttgaccttcgcaatcggaaccattatcagtgagccgatccttacatccaagctgccgatgtcaatttattatgcgggtgcttttttggtgctttatcttatcatgagcaagctctctttatctaataaatggcgatggctcctagtcgtgagcccgactgtcctaatccgaaacggggatattgatgaacgcggccttcgtaaagaaaggctgactgttaatgagctgcttggaaagctgagggaaaagggctatgccgacccggctgacattgatcttgctatcattgaagaaacgggagaagtaagcgtcatcccgaaagaggaagcgagagcggtgcaggtgcgggatttaaatatggaagctgaacggaattttatcccgattccgctcatactggatggcgaaatccttgatcataatttgaaatatctccaaaaaaaccgatcctggctgtttgagaagcttgaggaaaaagggtacagccccaaactgctgtcttcgattacccttggcacgatgaatgcacgcggtgatatatcccttgatttaaataccgctaatgaaccgcagcatgatccttacttatataaaccgggaaataacaattaagatggctctctcttgtaatgagagcttttttcttttttaaagggaatttttgtttggtgtcaaatgtacctagttaggaggggaactgaacatgaaggacttatccataagaaacgacatggcgccaacggtcagtttgctgtattccgcagtggaagaaaacagtctccgtctggcttccatcgtaagccatatgacacacagtgaactttactataaggggcgctgccaaacaaaaaacagcacggctcagcttttgcaccatatcacaaatgttgatatcagatgggtctggcgtatcaaggaaaatcggatcccggaccatattgaacaggcatacggcccgatgacagatgaaagcggacggctgcctgaaccggtgaatcagccaaacttagatgaactcctgaaaagacatcagcatgtagtagagaagctgaaatcggtatgcttcactttaactgaaaatgctttgaaccagccgctttccttcgaaggtgacaccgcgacgatacgatggggaatttggcatatggcagatcataaccgctatcatcaggcacatattgaagctctcaaaaaagaatggaagcaggatgtggcgaagtatgaacgctaaaacgaagcttgtgactgatcgaattcgtttgcgctgtatggaagatcgggatcaagccactttgtttgggctgctttttaatgatcctgacgtcatgacatattattccggtttaaaagataagaggcaaacccgcgagtgggtcaattggaaccaacgaaatgaaaaagggtacggcgttagtctgtggatcgccgaagataagcggacaggggagtttttggggcaatgcggcatcgttccccagcagatcgaaaatcaaaccgtaatggaaattggatatatgtttgcccgccgccactgggggaacggctatgcgcaagaagcagctcgggcctgtctggacatggctttaacgagcggcagttcggcaaaatgacggctttgattgatccgggtaacaaagcgtccatacgggtagcggagaaaatcggcatgcattacagcaaaacgatcagaaaatggaataaaccgatcgaggtatatgaaagaaaatcttacaattgaaagatagagctcagtttagtatcatgatatcatgtaaagttttctagggttccgcatgtcaattgacatggactggtccgagagaaaacacatacgcgtaaatagaagcgcgtatgcacacggagggaaaaaagcccgggagagtcaatctcatgtgagacgactgtccggggtttttttgttttcggagaatcctaatagatagaaaggaatgactcaaaatgaaatggggattggtcgtgcttgccgctgttttcgaggttgtttgggtgataggcttaaagcacgctgactcagccttaacatggagcggcactgccatcggcatcatattcagcttttaccttctaatgaaggcgactcacagtctgcctgttggtaccgtgtatgccgtctttaccgggctcggcacagcgggaacagtacttagtgaaatcgttgtttttcatgaaccggttggatggccgaagctattgttaattggtgtgctcttaatcggtgtaatcgggttgaagcttgtgacacaggatgagacagaggaaaaaggaggcgaggcataatgctgcactggatcagtttattgtgcgcgggctgtttagaaatggccggcgtggcccttatgaatcaatatgcgaaagaaaaaagcgtgaaatgggtgctgttgatcattgttggttttgccgcttcattttccttgctgtcgtacgcaatggaaaccattccgatgggaacggcttacgcggtctggacaggaattggcaccgccggcggggcgcttatcggcatcctcttttacaaggagcagaaagacgccaaacggatcttctttatcgcgttgattttatgctcagcagttggtttaaaaattctgtcataaattgatttttatcaaatcttcagtataatggataaatagtttagacttacaaagataagagggattattcatgaaatcatatatgactcagcggttggacgaataccgtgacggaaatgaggataaagggcggctcttggtcagctgccccgatcagccgggtatcgtctctgcagtttccgcgtttttatttgaacacggtgccaatattatagaatcaaatcaatatacgacagaccctgaaggcggccggttcttcctgagaatcgaattcaactgcgcaggcattcgtgagaaaaaaacatcacttcaggcggcgtttgcctctgtagcggataaattcgacatgacatggagcttaactttggcaagtgaattgaagcgtgtcgccatttttgtttcaaaggagcttcattgcctgcatgagctgatttgggaatggcaaaccggcaacctgatggcggagatcgctgttgtcatcagtaaccatgagggagcgagagagctggttgagcgcctgaacattccattccactatatgaaagcgaacaaagacatcagagcggaagtcgaaaagaagcagcttgaactgctggagcagtacgatgttgatgtcatcgtgctcgcacgctatatgcagattctaactcctgattttgtttcggctcatccgaatcgcatcatcaatatccaccattcattcctgccagcttttatcggtgcgaatccgtacaaacgggcctacgagcgcggcgtgaaactgatcggtgcgacatctcattatgtgacaaacgatcttgatgaagggccgatcattgaacaggatattgagcgtgtggaccaccgcgataatgcggaagcgctgaaaaacatcggaagaacaattgagcgcagcgtgcttgcccgtgctgtgaaatggcatttggaagaccgtgtcatcgttcatgaaaataaaacaatcgtctttaactagactgcaagaggcccgcgcaatgcgggctatttttgatgacaaaaaaccttgacaagtgtcttttttctttgcataatataaaaaaatcattgagcgttgaagaggattagtaagcagacctttctgtgacagagagcaaaatgaatcgctgaaacattttgccgcatgaaacctgccgaacctgccttggagtcctagggggaaaacctaggcgcataacctggcgttacaggagagcggagcgtgcacaagcgcgttcaatcaaggtggtaccacggaaacccatttcgtccttatgaatcaggatgaaatgggtttttttattgtagaagagccgcggaggagaataaatgaaaaaacaaagaatagtagtgaaaataggaagcagttcgctcacgaatagcaaaggaagcattgatgaggcaaaaatcagagagcatgttcaggcgatttccgtgttaaaaaaagcggggcatgaaatgattctgattacctcgggtgccgtagcggcggggttttccagcctcggttatccgtcccgtcccgttaccatcaaaggaaaacaggcggcggccgcggtcggacaaacactgttaatgcagcaatatatgaatcaatttaaacaatactcattaactccgggacaaatccttttaacgagaaatgatttttcgaaaagagaacggtaccgaaacgcgtatgctacgataatggaattattggaacgcggcgtcattccgattatcaacgagaacgattctacatctgttgaagaattgacattcggagataatgatatgctttctgcgttagtcagcggattgattcacgcggaccagctcatgattctcaccgacattaacggactgtatgatgccaatccaaatgaaaatcctgaggcgaaacgatttgattatttgccggagatcacgcctgaattgcttggatatgcaggttcagctggatcaaaggtcggcaccggcggaatgaaatcaaagctgttagccgcacaaaccgcgttgtctctgggagtgaaagtattcattggaactggcagcggagagcaaaaacttgcggacattttggacggcaggggagacggcacttatatcggagacaaagaactatcttcggttaacaacacaaggcagtggattcagttccactcgccgatatcgggagaaattatcattgatgcgggtgccgaggaggcgatgatccataatggaagcagccttttgcccgctggcgttgtgggcgtgaacggaagctttccgaaaggggcggtcgtggaagtcaggggaccgggcggcgtgatcggcaaaggccaaacccattactcctctgaggagattatggaggccaagggcaaacgcagtgacgaacttgattttgagaaaacgtttgaggttattcataggaatgactgggtcaatgtaaaagactaggaggcggaaaaatgagtgaagtttctgtaaaagcgaagctggcgaaagaagcagcagccgaaatgatcatgaaaacaacaaccgagaaggatgaggcgctcagcctcattgcaaacggactccgtaaagaactggattttctcttggcggagaatgcaaaagacattgagaatggaaaagagaatggtttaacaccggacatcattgaccgtctcacattggatgagaaacggatacgcgatatcgcggacgcggtggagctcttaatcgacttagcggacccaatcggcgactctcttgaaacgattgaaaaagaaaacggcctgtttattgaaaaaatccgtgtgccgctcggtgtcgtaggaatgatttatgaggcgaggccaaacgtcacagttgatgcggctaccctttgcctgaagacagggaacgcggttgtgctgcggggaagctcctcagccatccacagcaacaaagcgctcgtcagtgtcattcacagagcacttgagcaatcagcgcttccgattcacgctgtgcagctgattgaggatacgagcagagagacagcaaaagagctctttacgttaaatgatggcttagacgtattgattccgcgcggaggcaagaaactgattgatctcgttgtgagagaatcaacagttcctgtattagaaacgggagcaggaaactgccacatattcattgacgaaacagccaaaccgcaaatggcagaaaaggttgtcgtaaatgccaaaacgcagcggccttccgtatgcaacgcgattgaatcattgctgattcacaaggcatgggcaagacagcacgggaaagaattgctggcccagctggaaaacgcgggagttgaaattcgcggtgatgaacttgtatgtgaacttcacccttcaagtaaacaagcatcaaaagaagattgggaaaccgaatttttagcgcctgtcctcagcgtaaagacggttgaaaacgtccaagaagctgtgaagcatatccaacaatacggcaccaatcattcagaagcgattttaactgaaaatgacaaaaacgcggcatattttcaaacggctgtcgatgctgccgcggtctatcataacgcgtcaacccgctttaccgacggctttgaattcggctacggagccgaaatcggcatcagcacgcaaaagcttcatgcaagaggaccgatggggcttcctgcactgacttctacaaaatacatcattaaaggaactgggcaaatccgtgaatagcggggcaatgttcaatgaaaaagcttatctcattacgagataagcttttttatacgcgaaaaattgacatttcaaatttaattgtgtacaatttaattgtataaaatatatcgggggaatgaaaaatgagtcagccattatttacagcaactgtttcagcggtaggaggaagagaaggaaaggtcatttcatcagaccgcgttcttgagcttgatgtcgcaatgccggggacaccgagagccaagaaattagaaaaagcgacaaatccagagcagctgtttgcagcaggttatgcagcttgctttgacagcgccctgcagcttgtcgcaagaacagaacgggtaaaagtagagacagaggttacagcgaatgtaagtctgttaaaggatgaagcggaccagggctacaagcttggtgtgacgctgcaagtaaaaggagaaggagtcagtgcatcagaattggaggcgcttgtgaaaaaagcgcacggcgtctgcccgtactcaaaagcaacctccggaaatattgatgtgacacttgaagttgctgaataaataaaaagaggatgcctgtacaaggcatcctcaatttttttgatgaagtgtttccagcaatgtatatagagcggattttaactgtttgagatcctccccagactgctttgagagccccagaattgtctctggaatgtcaaccgctttttcttttaataacgctccgtcctctgtcaggctgatcaacacggaccgctcatcctcttcagatctttttctcgtaatcaaaccctgttgttccattcgtttaagcatcggagtgagcgtccctgaatctaaatacagctgttcgcccatttttttgacagtaagcgtttcatgttcccataacaaaagcaaagccaaatattgagggtatgttatattcagcttatcaagcagcggcttgtattgctttgtcatttcccgcgaacttgcatatagcaaaaaacatagctgattctccaatttcatatgatcaaatttattttccattttgttcaccaactcttttttgtcattcgattctattgtatctgaaaaacctcacttttcctattctcggcaaacatagcatgtttaaaaagattagaaagggaaatataacaactagatacaaataaggaggttgggaaatatggcactatttacagcaaaagtaaccgcgcgaggcggacgagcaggacatattacatcagatgacggtgttcttgattttgatattgtcatgccaaatgccaaaaaagaaggacgaaccggcacaaatccggaacagctctttgcggcagggtatgctgcatgcttcggcggcgcgctcgaacacgtagccaaagagcagaatatcgaaattgattcggagattgaagggcaggtcagcctcatgaaggatgagagcgacggcgggtttaaaatcggtgtcacacttgttgtgaacacgaaagatttagatcgggaaaaggcacaagagcttgtcaacgccgctcatgaattctgtccttactcaaaggcaaccagaggaaatgttgatgtaaaactcgaattaaaataatgaccggcatcctgagtgttctcaggatgtttttttggtgtcggagcatgcggggcgggcacagatttatgataaaacttcagagaagcgtttgaagcatgcctttaaaccaaaagttacagatgaagcgggtggctggcacggtgtctgccgtgctgaattgcgcgtatatgctgttttgtatttgcacagggcatagcggctacttggagaaataacaaggaccaggccgcgcatgcctgatccttttaatattctttcttattggcgaagttccgccatgcttgaaacggggataaatgctctgttagtgtcacttgataaaaggggatcgttctttcttcagcaggtttatcaatttctttataaatgaatgaatcatcaaacccggcttcggcagcgtctgtgtgctcagctgcatagaaaacggctttaggccgggcccagtagatggcgcccaagcacattgggcatggttcacagctcgtatacaaaatgcagtcatcaagctggtaggctcctagcaccttacaggctttccgaatagctgtgacttccgcgtgggcagtcggatcattgcttgttgtgacgttgttctgtccttctgcaataatggctccgtctttcacgataacggctccaaaaggcccgccaactcctgcattcaccccatcacgagcaagatcgacagcccgctttaagaactttttatgattcatcccaaaccctcctgtcagttgagtgttataagtatagccgaaaaaggggcaaagaacattctcaaaaaagtgcaaaataaacaaagtatttgggggatttgctaagataagaggagaaaagaggaggggtaatgatgctgcatttatatattgccaggcacggacagacccaatggaacgtggaaaaacggatgcagggctggctggattctgatttaacagaacttggactgtataacgcccgcgctcttggggagcgtctgaaggatattgaattgaatcaggtatacatcagcccgagcaagcggacagaagagacagcaaaaaccgtactgggatcgcggaggctcccgctggttaaagatcatatgttcagagaaatgtcactgggctcatgggaagggaaaaaacaagaagatattgaaagggacgaaccagatctttttcatgcttattttcattatcccgaagcttatcgccagcagggatgtgaaacgttttttgactttgaaaaccgggtaaggctggctctccaaactattttgagccttgtggaatttgatgaaaatggaacagccaaaatattaatagaaggggacgggaagcatcggaaaccgatttccgctttctaatagaaaaaaccatctgccaaagacagatggtttctattttatacaagctgtgtctgctgtgctctcgcctgttttgcggcttcaaccatgtttttcaatgcggcaaccgtttcttcctgctgtcttgttttcaatccgcagtccggatttacccagaagcggtcagtcggacagacggcaagcgcctcaacaataatgttgtacatttcttcagttgacggcacacgagggctgtgaatgtcatatacaccaaggccaagccctttcaaatacgggtggtcttttaagtaatctaaaaatcctccgtggcttctgctatgttcgattgtaatcacatcggcatcaagatcattgattgtatcaacgatatcttcgaagttgctgtagcacatatgtgtatgaatttgtgtctcgtttttcacggaagaagtggttaatctgaaagcttctgccgcccaagtcaaatactcatcccaatcgcgggttttcaatggaaggccttcacgcagcgctggttcatcgacttgaatgatttgaatgcctgcgtcttcaagcgctttaacttctttgcgaagggcaagcccgatttggaaggcgatttctttcctcgagatgtcgtttcgagggaaagaccagtttaagattgtaaccgggcccgtcagcattccttttacatgcttggaagtcaatgactgtgcgtagactgtgtctttcactgtcatcggttcaataaattcaacatctccgtaaatgactggcgggcggacacagcgtgagccgtatgattgaacccaggcatatttagtgaaggcgaaaccggccagcttttcaccgaagtattcgaccatgtctgtccgttcaaattcgccgtgaacaaggacatcaagctccaattcttcctgaatatcaatccatctttttgtttccgcattgataaagttttgatactgttcatcggaccactcagctttccgccatttttggcgtgcgctccgcacttcagcagactgcgggaagctgccgatcgttgtcgtcggcaaaagcggaaggccgagagattcattttgcagggctaaacgttcttcaaacggaatcggacgcttgaagtctttatcagttaattgctcaagctctttcttttgttcagaattggcgcctgttgcaaactgtttaagcgcctggatatcagccttagcctgctgaatctcttcgctgatcgccgcttttcctgatactaagccttctttcaaagctgttagctcggccagcttttcttttgcgtaggataatccgttcaataggtctttttccaaatgctcatcagggtgtttcgctactggaacatgcagcaggctgctggaaggctgaatccacagttcatcaacttttgcaatgctgagaatatcaagaacagcatcgagacgctcttcaaggtccgctttccaaatgttgcgtccgtcgataacgccggctgccagcactttgtctgtcgggaagccatgtgttttaagctgttccaggtttctgcctttgtcgtgaacgaaatcaaggccaattccctgaaccgggtaagagatcagctcttcataagcatcaacagaatcaaaatacgtctgcaaaagcacattcaaggatgaaagctcacttgtaatgctttcaaataattcttttgcaccgcggacatcttcactagaggcggtaacgagcgccggctcatcgatttgaacccattttacgccttcttcttcaagctctttcaaaagctgtacatataatggcacaaggcgtttttggatcgcttttgcttcagacggttcatagcctttagcaagcgtaacgaacgtataagggccgacaatcacaggctttgtttccacaccgtattcctgtttgatccggcgataatcttcgagttgtttgtttcttgtcagacggaactcaatgctctcgtcatattccggaacgatgtaatggtaatttgtattaaaccattttgtcatttcactagatacggcgtctttgattccgcgggcgatagcgaagtatgtatcggtagcgtcagtcaaatgtctgaaacgtttcgggatccagttgaagctgactgctgtgtcgagtacatggtcatactgtgtgaaatcagaaacaggcacaacatcaatctgctggtcaatttgtgtttttactgcggataaaaatagttcgtcgctttgcttcaaaaacgtatctttatcagtactgcctttccaatacgcttcaagtgcttttttccattcccggttcagtccgattctcggaaatcctaaattcgatgttttgatggttgtcattgtttctcctcctttatatgtaaaacactctctttcacccgcggatacaggctgctaagaggttttctcacaacaaaaagcctctttcccatgagagaaagaggcttttctacgtaaaacactgcctctctcatctctcagacacaatctgatggaattagcaccgtgccttatgagacatcagtctcggcgcgaaaagcagtgcgccccatttcacaatggtattacggtcggttgctgttggggtcaaaaggccaatccctcgcccaactctcgataagagaaaatgttattaattttttgaaaagttgaatcatttgttggtaatcttaacagtaattcaaattcattgtcaacatagaatttgaaatttttatttatatgatgtggtgtatattatataagaaaaataatcttatagggttaacaaatgtgattgctctgctttttctgcgagttcatcaggagctgttaaatacaggaatccattgcctgccagcgtttttgcaatatcaagaggaagtgtcctgcggattagctgtgcgaaaacctcagattcagaaagctttctttgaaatgattcttcttcatagcttttgattaaagcaagcgcaccgctgacatgaggggcagccattgaagtgccggtcagcttaccgtacttcttgttgggaagggtggataagatattttctcctggtgccacaaggtcaatctctttatttgcgttagaaaattctgataattctcgtgctactgaaacagatccaactgcaatgacttcgttataagctgcggggtaggaaagctcttctgtgcgttcgtcgccgtcaccctcatttcccgctgcacaaacgacaagcactccgtttttgactgcgtttttcactgcttcttccagctctggcacatcgcttggccctccaagggacattgagatgatgtcgactttctgttccaccgcgtagttgatgccgttaattatccattcgtattgtccgctgccgttctcgccgccaagaaccttcacaatcaataggcttgcctcaggcgcgactccggcaatgcctccgtttgaatcattagctgcaattgttccggcgacgtgtgtgccgtgtccgttgtagtcggaaattgcatcttccttgccgccgtcgtcatccgtgaagttctttccgccgatgatttgattttttaaatcagggtggcttgtgtcgcagcccgtgtctaatacagcaactttaatatttttgccttttaccccttttgcccacatttctggcgccttaatcactttaatgccctcaggaagctcgtttacatccatgatctgctcattcgtcacatacgggatcaagcggatttcaccattcataaaaaagccctccttttttatgctttcaagtggattcaagggtgttgcctcatattatatgaaaaaaacaagcgctcggacagagccatttgaagcattttgaaaaaataggatacacaccaaagaattagtaattttcaaaatattggatggcttcggcgtgtatgactgggattcaactgtaagtcaagttataatagtgttggggaaaggagcagtgtcatgaaactgaatgaaaaattatatgcatttttttcagagcatgtggaacaaatggccgaggaatggattgaaacgatggaggaaagtgatccgaattcgctttacgccctacataatgcaacagtaacggaagaattgaaagagcaggacagagaattttaccggcatctgaattacatgtatgttttaccggaaaaacaatttctcgaagagtttcaagagtgggtcattgagctgaccaacgatcaaaaacatctcgacacaccggttcagtatgtcattcgggagtttatgagaaacaggagattatatacgaagtattttgagaagttcgcagaagaaaatgagtcagcgtttgaaccgggagagaagcaaaaatgggcagatttgattgtaaaagtatttgatttcaccatttatacattcgttgatcacgctgaaatgaatgccaagcagcaattaaacgcccaaagagaaatgatattggaactaagctcacctgtcattaccctgagcaaatcaacagctctgctgccgcttgtcggtgacattgataccgaacgggcgaagtttattctggaaaacacgcttcaagcttgtgcgaaaagacgtgtggagcatctgttaatcgatctgtcaggtgttgttgtggtggatacgatggtggcgcaccagatctttaaattgattgaggcgcttaatctgatcggtgtccggtcaaccctgtcaggaatcaggcctgaaattgcgcaaactgctgtacagctggggattgacttttcgaatattaccattaaaaccaaccttgcccaagcattaaactatcatcaataaaaaaatccgctatctgtgatagcggattttttatgatgcgaaacataaagatacgagaaaggatcccgcgaataataagaggacgaggcaaaagaacacccagtcgcgccggttcacgctcaatttcctataatatgtccggtttctgcttcctgtaaaacctttcgattccatcgcaagcgctgtccgttccgcttttctgatggcgcttgccaatagcggtatggtatatcgttttaacgcactgattttcttaatgatgccgctctccgccgctcctcctctgattttatgagcctgctgaatcagctggatctcatcctttaacagcggaagaaagcgaaagcctgcaatgacaccgtacgcgagctttggtgagagcctgcactgctggacaaggctcagcataaataaaatcggatcggttgtaaaaacaaacatcatcgataaggcggaaaagcataaaatacgaaacccaagggagatgccgacagacacattatcgctgttaattgagatagggcctgcttgaaacaaaaaattattcggtgttgtcggcacctttccaaaaactgcggctgtccacacgcacccgaatgctaaaatcaaaaacggaatcgtaaacaacaaccattttttcaatgggattccggccgccagtagaacgcccgcaacgatgatgatataaaaacatgccggagtgtaagggttgtaaataaacgacagcatgacgacacaacaaaaaaccgccgccgctttcacagtcggattaatgagatgtaacggctgcttcatcacgcacctcctcttgatatgccatccattcatatagaaggggaagggtgagctttgctttttggacaagccctgtttcttgagaaaacaactgcgctggagatccgtcaaaggccaggcctgtatcgtgaagcacaagcacgctgtcagcatacgaagagactagctccatatcgtgtgtaatcataaggacagcggttccctctgtcttgatacgctgaatcatttccatgcattcagtcaccgtgcgggcatcctggccaaaggttggttcgtctaataataaaacctttacgttatgcatgagcatagtagcaacgctcagtcgccgtttttgcccttggctgatcgcaaacggatgatgatcagccaaatgcgcaagaccaaaacgctgcagcaggtgttgcgcttttttctcagtttcagcatttgctttctggccgaacagaagctcgtcatataccgtatcggtgacgaattgatgctcagggttttgaaaaacaaatcccatccgtttacgcaattctttttctttatatttctgcagcggctgatcatagagaaggattttgccgctttgcggtttcatgagacgggccagaactgataggagcgtcgattttccagttccgttcggaccgacaagcgccgttaaagagccttcgcgcaacgaaaagctgatgtctttgaaaatcgcctgctgtcctctcgcgaacgaaaggctgctgacttcaagcacactctccccaggaggggctttcttctttttggcatgcccggcaggaataggctctttgaacagcatctcttttgataaagtaaacggcatactcagcttttcctgcagatgacagacctttggaatggcgatgcccaatttctttagtgtttctgcttcatgctgaaatagatttttcgtcaggccatccagcgcttttttgcccgatttgtcgagcacgatcgttctctcaatccaaggcgcccattcatcaagctggtgctcaatgacgaggaggctgaaacctttttcccgctgaagatccttcatcagatgaacgaactcccgcgctgagaaagggtctaaaagagaggtcggctcatctaaaataataagctcaggctccatcgccaaaatacaggcgagagccactttctgcttttgtcctcctgaaagggttgagatcattttttcttttaaatgggtaatgcgtaatttttctaatacggcgttgattttctctgtcatttcttcttttggaatttgcagattttccagcccgaacgctatttcgtcctccaccgtcagcatgcagaactgctgatcaggatcctgaaaaacgaccccggcatgctgagcaatcgtttcggaggtttcagcatctgtgaccggctgttgaaatagaaagacatgtccggactgaatgccgtcgcaagcctccggatatagaccgtttaaacaaagggcgagcgagcttttaccgcatccgctcggtcctaataataatacacattctcctttttgaagctcaaacgaaatgtcttgaaaaaccggtttctcgtcttcttcataagagaagctgagctgctcaaccgtcagaagctcatcaaaggcttgcatgttctgacgcccgcttccgtttctttttcagttcctttccgagtgccattccgtttaacacacctgtataagcgagagagtcgctgacagcttttccgagaagccccgccaaaagcgcgccggaaatgaggcggatcacaagcataatgagcagataacctggtgaataggctgcatagccagaaacaaagagatcatagataaagctggctactgaagaccccataccggccagcataaggacagggagagagtatgctttccagcgtgttgcaagaaatacagcctcagccccgagcccttgaacaatgccaatgacgatgaccatcgggccagacggatttcccagcaggcactcaacgagagcggcaatgatttcagaaacgagcgcagcacccggttttcgaatcatgtacgcggcgatcacagaaacgataaaccaaatgccgtaaatcggttcataggcgattggcccaaacatacctgcaagtacgtttccgaaatgtgtaaataataaataaacaacggcaaatacgatactgataacggacatgatgacaatttcttttactttccagcttttcatgttatccctgctttctgttttttcttgatggactgttagccgaaagattcacagtcatggtgatgtggtttgtttgctgctcagccatgcggaaaacggcttccaatgtgctgaatacgtcatgcgcatccccgtcaagctcgctcgcgtaatggacaccctgtacgaaagtgccttgggcttttgcaatgtcgacagccttcataatcaatcccatataatccggctcgttcattggataaagggcaaattggcacggcgcttccgccttcaagcctcggacagcatcttcattgacacgcttatcacctttggaaagatatgtatccccctgtgtgtcacccgggcatccaatggaaaacgtgccgttcatgacgatgtgtttttcgctgtttgctgcatgaaggtaaatggcttttgcagcatcgaatacatgatcaatcgatccgcgtaacaccgtgctgatatggtcggttttcgtccataccttggatgtatctgtttttttcaacgcagacttgatcacactgataaaatcatccgtcatcggatataaagagaagcgaaaaccggcgattctgcttgtaccgcaaatatgctccattttctccgacctcctgtttttttggtaaaataaaaaactgcatatcctaagggaatatgcagtcatagatcgattaagcgcacaaaaaaatacaccattcggtcaacctgcacttccccacgctggtattatccagatcgggtcataagggatcaaagcgcgtttcttccgcgctttatctcagccaaaacagcacccctagtgctttccgtatacaattttttattttgacatcataatagatgataagaatcattttgtaaacaacgaaatcatttttttcatatagggacgggagaggatgatcaaatttggaaaaaggacacatattaattgtggaagatgaagaaaaaatcgccagggttcttcagcttgaattggaatatgaaggatacagtgtcaccatcaaacacaatggcacagaaggtctggatgcggcagcgaaaggcgggcattccttggtacttcttgatgtcatgctgccggggcttagcggactggaagtgctgcgccgcttgagaaaaacggattcgcagacaccggtcatattattaacggcgcgagacagtattcctgataaggtaacaggtctggacatcggtgcaaatgactatgtcaccaagccgtttgaaatcgaggaattgcttgcgagaatcagggcggcgctgcgactaaatggaacaaaaacggaagatatcggcacctttcttacatatgacgatttacgggtgaacgaaaaaacccgtgaagtgagacgcggagacaaagaggtggaattaacgccgcgggaatttgatttactcgtctatatgctaaagcatccgcagcaagtgctaacacgggagcaaattctaagctcggtatggggatttgattatatcggtgatacaaatgtcgtggacgtctacataagatacatcagaaaaaaactggactatccttacgaaaaacagctgatccatacgattcgcggggtcggctatgccattaaggggtaaacgatgaagctgaagacaaagattcatctatacacatcaatatcactgttgattttattaattttggttcataccgcagtctatctcattttttcgtccgcgctgacatcaaaggatgcggcccggcttgctgatgagacggataacatggccgaagcgctgcgtgcggctgaaacagaaggagtggctttgcaggatatgctgcaggcctatcttccggcaaatggcatggtgcgtgtagtgaatggtgatcaaaaagccgttatgacgatcacaaaagaaaaagcctataaagattttcctctctcttttcatagcggagaaaaggcagatgtgaggaaacatgacggcaagctgtttgccgaggctgctgttccggtgatttggaccgatggacaagtggtgtctcttcagctggttgaaaggcttgagaacacagaagagagtctgtttctgttgaaaatcatcttaatcgctgcaagtgctgctgtctgcattgcttctttttttgcaggcagcttgctactagcccgccgaatcatcaatccgatcagacgattaatgatcacaatgaaagacatacagcgagacaaagaatttaaaacgatttctttagaaggacagtccaacgatgaattgtatcaaatggggctgacatttaatgaaatggcaatgatgctgaaggagcactatgataaacagcagcaatttgttcaagatgcttcacacgaattgaaaacgccgctcaccattatagaaagctacagcagcctgatgaagcggtggggggcaaaaaagccggaggtgcttgaggagtcgatagaagccattcactcagaagcggtgcatatgaaaaaactgaccaatcagcttttggcgttggccaaaagccatcaaggactcgaggttgatctgaaaacaatcgatctgattaaagcggcgcgcgcggttatgcaaacgctccagtccgtttatcagcgtgacatattgcttgaaacagataaagagagcctgcttgtaaaggctgatgaagaacgcatcaagcagctgttgaccattttgcttgataatgcaataaagtatagtgaaaagcctattgagatgtcagctggaacgaggaatggacggccatttttatcagtgagggatgaaggcatcggaatacctgaggagcatatcccgcatttgttcgaacggttctaccgggcagatgaagcacgaaacagaaaaacaggcggaacgggtttaggcctttccattgccaagcaaatcgccgatgagcatggcattgagctgtctgtcaaaagcaagccgggacaaggaacagctgtcaccatgcaattcagcgaacagaatgggggaggccgatgactaaaacaataaaaacagtatcttttgccgcagcagccattttagttgtcatcatctgtacgtttctcatcattcggcaaacccatgagaacgtattgtcaaaggagactgtcgtaaaaaaaatcgaatcctcttatgaaggcaaggtcacgaaagcaacacaatcaaaggataaaaaaacatatgatataacgcttgaaaatcaaaagggaacttactttgtaaaagcagacgcaatatcggctgacattctttcaatgaatagagtaaaagcagtgaatccatctgccatgacagaaaaagaagccgagcatctcgcgcttgagcgggtgccgggaacggtcaaaaaacaaacacgacaaagtcgagttgccacttataccatacaaaaagaagatgggaaaacatacgaagtgaaggtagacatgcaggcaaaaacagtcttgtctgccgatcaaatcagcagcaaagatcaacaaaaaacgccgattacgaaaaaagaagccaaaacaattgctgagcgagaaacgggaggaacagcggatgacgcagatctcgaagaaagtgagggcactctcatctttgaagtggacgttgatcttcctgataataaggaagcgacagtgaaaatcaatgcctacacaggaaaggtagctaacattgtgtatgaagactgacggtttctcatcaaattctcatcttgctctcgttttcctttcatgttgagtgtgtaaactgtactcatacaaaacaaaggaggactcacaaatgctcaagaaaaaatggatggtcggtcttttagcagggtgcctagcggccggaggattcagctacaacgcgtttgccaaagaaaacaatgaaaacagacaggcttcttctaagacggatgcactcactgaacaagaagcagaagcaattgctaaaacagttgttgacggcacagtagaagacattgacagagacctttacaacggcaaagaagtctatgaagtggagattgaaaaagaaggtgaagactacgacgtttatgtagatattcgtacaaaacaagcgcttaatgacccgctaaaggagaaagcagaacaagtcgccataaccaaagaagaagctgaagaaattgctttaaagcaaacaagcggaaccgtaacagaaagtaagcttgacgaagatgacggtgcttacatctatgaaatggaaatccaaacgaagcaaggaactgagacagaatttgaaatttccgcaaaagatggacgcattatcaaacaggagatagatgactaatcaaaacccccgctgcagcgggggtttttcatgataagaaaccttcttttggacaatctaagtagaaaaggaggcgaaacgcatggaaaagaaagaggagcaatacatcaatcaggctgaatatgtccctcatccgacgaaggaaggagagtacgccttatttcttcatgaaacgtatcatttgctttctgaagatgacgagacacaaacaacagaataagggcttaggcccttgttttgttccgtaattgtgatgtaagcgcatttattacttttttgagttgacacagcttgtttttttctgtaatctcagtgtgtcaattcaattaggaacttcgttaggtgaggctcctgtatggagatacgctgctgcccaaaaatgtccaaagacgccaatgggtcaacagaaatcatcgacataaggtgatttttaatgcagctggatgcttgtcctatgccatacagtgctaaagctctacgattgaaggcgcccgcacgctttttttgccgtgcttctttcaccttcaatcccgaaggctttttttatgcctttaaaacgaaaccaatcaaaggaggtgcggagtatggattctccccattcgagtcaatctgaagaagtacccatatactatgacagcaagacaattgattacacgatgaggagacgaactgccgcaccttctggcgaggccggcacgtctccgtagaggaggtacgagtcccgatggttcaaaacatgacctatgacgaactcattttacgcatcattattttactgcgagacgggaaaatcagggatttcagaagtgttattgatgagcttcagccctatgacatggcatttatttttaaagaaatgccggaaaaacaccgcgcccgctatttatcttatttaactgtagacgatatcactgatatgatcggggagctggaacgcgaatttcagcttgtcgtcttaaataaagtcggaaaaacaaaagcaacactggcgatgaacaaaatggacaacgatgacctcgctcaattgcttgaagaaatggacgaagaactgaaggaacagcttttatccagcatggaagcgtcagagtcaaaagctgtacagctcttaatgaattacccggctgattcagcgggacgcatgatgacaaaccggtatgtgtggattcctcagcattacacggtaaaagacgcggtcgtcaaactgaaaagcttcgctgaaatagctgaatcgatcaactacttatatgttattaatgaaagcaaacagctggttggggttctttcctaccgcgatttgattctgggtgaacctgaagaaaaggtgcaggatttaatgtttacccgcgtcatatcagcagatgctcttcaggaccaggaagaagttgcccgcctgatagaacgttacgattttttggcaataccggttgtagaagaaaacaacgtgcttgtcggcattgtgacggtcgatgatattatcgacgttgttattcgggaagctgatgaggattacgaaaaatttgccgcttccggtaaagacatcacctttgacacaaaagcttacgtggcggcataccggcgcctgccatggctgattttactcttgtttatcggactgatttcaggaagcattatcagctattttgaagacgcgctgaagcaggttgtcgcgcttgcgtttttcatgccgatggtgtcagggatgacaggaaatacgggaacacaatctctcgcggttgttatcagaggtttgtctaaagaagaaatgaacaaaaaaacgattgtgcgcctgatcttccgggagttcagaacaagtatttttatcggagcggtttgttctgtgctgattgcgattgtctccatcatatggcaggggaatgcgcttttgggatttgttgtcgcctcttcactgttcttaaccttaatcatcggcacgatgtcaggaacgattatccctattattttgcacaaactgaaagtagacccggcgattgcttctggaccgctgattacaacgttaaacgatattttatctttattaatctactttggcattgccactgcattcattcactcattataaacgtaaaaagtccgtctcaactgagagccggacttttattatttaacggtttttgtaccgaaagtgagcattaagctgcccctccagcatttttttccgcacttgcggatcgttttttaacatctgttcttttttgcgcatatcctttaaaatctctgccgtctgtacgccgtcttcacgtttattggcgatatccatcagccgctctacatcagcaaaggagtattttcttgtcccccttgaagaacgctgcgggtaaatgagctttcgttcctcataatacctgatctgtcttacggacaatcctgtcaattcactcacaattccgattgaaatcacttttttgtctttataagaatgatcttctgtggtcatttttccacccctggatgtcttttgataatagtatataaaaaacaaagagaaaaaacctaacgcttgtcatattttctaacatcaaatagaagatttttgaaaaaatacggaagaaaaattaacaagaataatgcgtaacacccaagcacgttttatcctttatgtaacgaatcaaacaaggaggaaggataatcatggaggaagaaaaagcggtctcactggcaaaagaaattatagagttggatatcaagcgtgatgaaatgctggagacgtttatgcagcttgccggagaacaggcttttcaattattaagatcggttcaaaacggacaataccgaaaatcttcgtaaacataaattctttacattagattcataccacgttcatttaaaaagagtatcttttgtataggatacctcaaaatgaaggaggacgctatgagtaatttattgaaatccgctttagaaaaagaacgacgccattattctgaaaaactctatcagattggggtttataataaagaggtcatgaacaaaatgacgatttctgagcttcggaaagaatacgcttatttctttcgaagcattacaaatcataaaaattatccttatacaagataatgtataaggatttttttgcttttagaaggaatttctcgaattatagcgaatacgtatagtaagggactgaactcttattatatgtaagggttttcattatttttttataaaaatcctatatacgaggtagatatgatgagattatcgtttaacgaagaagaagttgagcgtgcgatgaatttgtacagagtttttgcaagggctttcaaaagtgtgtccgaacatagtatccgtgatagcaaagagcacggttttaatcccactgaatttgctgtactggaactcctgtacacaagaggcccgcaaaaattacagcaaattgggtcgagacttctgcttgtaagcggaaacgtcacatatgttattgacaaactagaaagaaacgggtttttagtaagggagcaggacccgaaagataaacgctctgtttacgcacatttaactgacaagggaaatgagtatttggataaaatttatccgattcatgcactgcgtattgcgagagcgttttcaggcctttcgcctgatgaacaggaccagctgatcgtcctgctcaagaaagcaggcatacacagccagcatttgctgtttcgttaactattctacactctctgtttcaggagagtgtttttttgtttcataagattctttttaaaacatcttcaatcttcctatcagacatttcgccaaggtatccattgacgtgttttttatactccttcatctgttcgttcgattgaaaaaatgccgcgatatactcttctgctttcttcatgtcccagtttctcatatctgtgacgagtttcctttcatgtagaaggtttaaattcatttcctcctgtcccggcagtgcatgataaataaataccggaagccgtttctgtaagcattcactgatggtcacgcctccgggtttagtcatgatgcctgtcgcctgttcgtacaaacggttcatctctgctttgctgtgaaggtaagaaatcgcctcgatcaaggggtggtgtaaacttttgacataggagtagagcttttcgtttctgccgcataatattttgtataagatctttccgcctggcgacagttcctgcacccattttaaaatcccaccgacccccatactgccccctgtgatgatgatggtatatggcgggtggtgctgcaaggtatctgctgattccattgcaaaatttcggtgaactggaatgccggtcaagtatatgttgttctgatcgatcccctctgatattagctgcttctttacttccgtgctcggaacaaaatggtaatcaatgttcttccgtccccataattgatttacgaaaaaatcagtgtatacattcacaaccgtcagattcggatattcaggctttaatcggttcagcagataagaaggcagcgcatgtgtgcagaaggcgatatcaggctgtttttcttggaggatgtgcctcatttgctgtgtgaacagccattcgtacatgaaatagcgtttgtcatgctggaattctccgcaggcgaggagcctgtaaatgccgctgtacgttttcgggaaatattgaatccattttaaataagccacggaggacaatttttctaaccggctatacgcatgtgaaaagatatcaatcttttcagctgccagcccttgagactctaattcagcctgcaatgcatcagccacatgatgatggccggtggaaatgcttaaaaaaggaaaaatgagaatgtttttcatgacagtcctcctaaaaaaatatggcaactatattttgaggagaacgttcacaaaatataagggtgtttttgatcataaggaaggtgaaaagatgaaaacttgtttcctttccatatggagagtggttgacccgatttatttctttttttcaaggctaagcttgattgacaacgatcaaaaaagcgtttttcgagtcaggctgacgaagtataaaggacatcatgtcgtgcttagcgatggaacgcatattagaaaaaatgatgtgctcgttaaaattcatctgcataacataaagctgatcagggagcttcaaagcattgagagcgcagtcagaaagggaatcattatttatcagaaagtatatcaatcgatgccgcttcttcttgactatatcaacaatcataaaaaaagcgagaaaatcaaaggaatcattgggattacaatgcttgacaaaggtgtggaaaggctcggctttgatgtgatcaccccggtgaatcctttttacagatgctttaaaaaagtgtcccatgtgccgattttatatttgacttcaaagcctgtgagcttgcggcatttaccgaattcatcctatttgtttatctcaaaagaaaagctgcagaaaacctatcaaaaaaaagactgatgcctcggtcagcacagtcttttttgattaaatctgatgaaatgtcacttcagggcggcttccaacacggatatttacgccggtttgtcccaagccctcgctgatataaaatggtttatcgtgatgataatgaaggcctttaatcatgttcattcgcacgagcttgcccattttcaccaaatgatacggttttggccagtgaatttgcccgccgtgaaaatgccctgacagcaggtaatcataatgaacatctttcatatccagaataatatttgggtcatgtgttaagacaagatgatagccattttccagactttgataagagccggtgatattactccgattcgtactgtaatcatcaatgccgataatattgactggccctgcagccgtctcgattcgaacatgttcattttgcagcgtgatacagccgttttcctctaaaactcgcttcaatctctgaaagtcctcttcttttaatacataatcgtggttaccgaacaccgcgtacattccatatgcaggcttcagcttttgcaaggcgttcaagtaacctgccagcttcggaatattacgtttccgatcaagaaaatccccggtaagagcaatgatgtccacaggctgatcttttgttaaatgatacagctcctcaggtgagacagaaatgttttccaagtgaagatctgataaatgaaggatatttaatttttttctggctggaaggccgtctttttggtcgattgaaatggtgttgactttcacatcttttgtattgcggttcgctttatatagaaatggcacaaatacgagtatggccaatgaaagtaagattgtaaacaaaatatatcccctcccttctatcagtatagtaagtgatcaagccctatggatagcgggaattaatgggtagagacaggttgaaaaacggattgtcatatgatgaatgatttggaagggaaaagggataataaattttgacacatgaggcagaacatgccgacggagtcagaataacaaatggatgtgtaagcaatgttacgattgatgagacaacaaaaaaaagaaacatattatctctggatcgcattatttcttcttttattgtatgtatccccgctttttattttaaaggaagatgcccatatccgggtccacgataatttagattccaacatcgcttggtacaaggttctggccgatagcggagaaatcgtcggcaaggttgacgctgccattccgcaaatcattaacgggctgccccgggatgcctttggcaccgagtggagcggaattgtttggctccatgctttcttttcttccatgaccgcctatgcaataagccagacggttacaagagttgtcgctttttttggaatgtatgtgctgctgaagaaacatataatcccggaaccaaaagcggctttcatccgaattggcgtatcgcttgcatttgccttaacaccgttctggccttcgggaatgctgagtacgcttgggtaccctttggcactgtgggcttttttaaatatccgaaaaggggatatctcatggagagagtggctgacgctgggcttgctccctctatactcaagctttgttctaggtttcttctttttcctggcagggatggcgtgtttttggctgtatgatgccattacaaaaagaagatggaatttgatgttcttaggcagtattgcatttatgacgagtatctatcttttcgttgaatatcggcttgtctattcgatgctgtttgagcacgcaccgatgcatcgtatcgaatttatctcatccaggcatgacgtttggcattctcttcggctatccgtaaaaaactttgtctatggccataatcatgtgatgaccgttcataccgttgtcatccttccgatcctgctggtcgtatttgctgctctgctgttcaaacgaaatcggacaaagccagaaaatgtgtatctgtttttatgtgtgcttaattacggattgtcattatggtatgcgttttggttcaacaaaatttgggctgttccaaagcagaaatttgcctttttagcagaatttaattttgcccgttttcattttcttcggccgcttgttatatacgtgagctttgcgcttgctttatatctcatttggcggatggggaaaggatggaaatggcttgtgtacgccgcagtcgctgcacagctgatggtgttggcgccttttaatgaagaatatacgtatggcgttcattacaacgcgccgacattcaaggagttttatgcatcggagcaattcaaagagattaaggaatatatcggacgtccgcaggattcgtacagggtggcgagcatcggactgcatccgtctattgcccaatataacgggttttatacgttagatacgtataacaatctgtatccgctttcatataaatatgaatttaggaaaatcatcgaaaaagagctggaaaaaaattctcggctgaaacaatactttgatgaatggggcagccgctgctacctttttgtcgatgaactcggtaaacgatatgatttcaaaaagaactcgaagaaaacgatcaacaaccttcaattaaatacagatgtatttaaaaaaatgggcggacggtacattttttcttctgttccgatcatgaatgctgaacaaaaccatctcgcgctcgtaaagacgtttgaccataaagattccgcctggcgcatttatttatatgaaacaagataaggaggatatcgattgaaacagtcacagccagtattaaccatcgtcgtcccgtgtttcaatgaagaggaagtgtttcaagaaacaagccgtcagctgacagaggttgtagatgatttaattgaagaaaaattaattgctgaagacagtaaaattctgtttgtcgatgatggcagcaaagaccgcacttgggctttgattgctatggagagcataagaaacaagaaggttaccggcttaaaattagcctgcaatgtcggccaccaaaaagcgcttttagccggactgcataaagcgaagaataggtcagactgcgtcatttcaatcgatgctgatcttcaggacgacatctctgtgatccgggattttatgctgaaatatcatgagggctgcgagatcgtttacggtgtacgccggagcagaaaaaccgatacctttttcaagcgcacgaccgcgttagggttttatcgtctcatgaataagcttgggattaaattaatttataatcatgctgattttcgtttaatgaataaaaggtccctcgaagagcttgagcgttatccggaagcgaatctgtttttaagaggtattgtccccatgatcggctttaaatcggccgaagttttgtatgaccgcaaggaacgctttgccggcaaaacgaaatatccgctgaaaaagatgctatccttcgcttttaacgggattacttcattcagtgtcgcaccaattcgattctttacgcttttagggtttgttttgtttttcctcagcgctgtggcagggattggcgcgtttattcaaaagctgctcggccatacgaatgcaggctgggcgtctcttatcatatccatttggtttttgggcgggctgcaattgatgggaattggaatcatcggagagtatattggaacaattttttctgaagtgaaaagacggccgaaatacgcgatcgatattgatttgtataatgaacagctgagcccgcttcagcgccaggaaaaagagcggttagaaaaaaagtacagttaaacacggaaagagctgacttcattagtcagctctttttcttcaactgatgcaatatagcgctaagcggttcgtcttgcgggttgcggtaaaaatcaaaaaatgggcagccctgcttcttaattcgatcgatgaccgtatcaattgtaaaaagagcgggtgttaaagatgattgcacctcatgccagtagagcggggctgcaacagtcccaagctcatttcctctcgtcgaatagggacagataatcgtttttccttctgcatgctgcaaataatcaagatacaatttgccgtgtctgtttttaatcaagcgttcagtggtaaagagctcgggaaatgcattggtgcagtactctgcgatcagctgcgtaaattggcgtgtttcttcatacgtaaatgcctcgggagacaagggaatataaagctggattcctttgttgccggacagcttcgggtacgatgtgatgccaaaggaatccaacagccgcttcagttcatttgcggcctgcacggccataagaaagtcatctcgcgaaggcgggtctaaatcaatgacaatctcagccggacgcctgcttttaatggtttgaaaaggaacgtgaaactccaaagcaagctggttgcaaagccatagcaatgtagacatatcctcacagacaatatgttcatggcttccatcatagaaggactgaacaaaatccggcgcatagtccggcttgtttttttggaaaaatgattcgctcctagatccatgcggatagcggatgacggtgacagcccggtttttcagaaatgggagcaggtagtcactgacttcaatcatatactgaataaaatcttcttttgtttttttattcttttcaaatatgattttatccaggcttgtgaactggagttttgggtgaaccggtttggagtgtcgtatgacttgcgcatacgtgcattcggtccagtccatttggaattcgaaaccgataaacgatacctctcttaatgtgccatggagaattgttaagtattgaacagctgcacaaatcgaaggttcaagcttaaactcgcctgagggtgtttgatgtccgtgctgttccataatctcgcgtatagcgcttttttcctcatcgcgcattccgtgcgagacagaggcaatcggtgtcattattccgttttttaacaccgataccgtcagaaacccgttgttagggttgaaccctgttatgcaaacataagcttgtttaaagtttttatatttgagccaatcggacgaccgcttcttttcaagccatttgctgtttgttttcttcgctacaattccttctccgtcatattttattaccatctcccagagttgatcaaaatgatcataacagggaatggattgaatggtttcttttgcgtaaggatctggagatgcaggaagctttgctgcggatatgagttcacgcagcgattttttgcggtccaaatacgaaagaagcgttacatcttctccgcttcgctctaacaaatcaaaggcgagaaagcagcacgaccgcgcgtttgccgattcctgaatcttgtctggccttttcaaacgcccccgcacttgaaggtgttcaaaatctgcacgacagggattcaccaaacatacgatttcaccgtcaagtgtcagcggaagctctttttctaggtgctgaaaggcagttttggcgaattgtatgatttcagggaaggtgctgctgagctccacaccatttctgctggttaaggtcacacctgaagaatggatgcggagaatacagcggtacccatcatattttacttcgtaacgccattctgctccgattggcggtgacgaagttaagaccggctgcatggtaaacgccatgcgctatgatgtgccggaggctttttttctagttgttttttgttttttatctccggctcctttcggttcagcggcttgtgcaggtgcggcagccggtgtctcccggttcggccttctggttctgtcgatgctggcttgcagagcgcttaccaggtcaatgacatcttcacgaggtggcgctttatcaggagtgacagccgtttctttattttctagcttgtcgttgactctttgcagcagcgcctgtcggtacgtgtcttcatatttctcaggctcaaacttagcagtcagttcatctattaatgtgatagcagtttgcagttccttatcgtttacattcgattgatcatgtacacctgggacttgagcggcgcttctgacctcatcgggataatggatagactccatgacgatacaattttcataaacgcggagaatcgccagctgctgctttgacctgattgtcatattggcgataccgatctttccggttgagcgcagcgcctcacgcagcagggtataggccttcgtcccattatccccggggccgacaaagtaggagcggttaaaataaatcggatcaatttcctgaagctgaacaaagtcaacaatctcaactgctttctcctcatgctcctgttttaagctttttaaatcttcgtctgtcagcactacatattttccttttacatattcatatcccttcacaatttcatcaggactaagagttttttcgcaatttgtgcaaactttctcgtatttgattggtgcgtgatcctctttatggaggctgcgcagtttaatatctttatcttctgtggccgcatatagcttgatggggatgtttactaatccgaagctgatcgatcccttccacattgtatgcatatcgataaacccctttttttctttagtgtgaagagaaggagtacgattcatgtgtagtaacttatgggtgaaaaaaagccggcgctgttattgcgacggctgttcaataatgaattgttcgaattgttccggaggtattggcctgctgaaaaagaagccctgcaaatggtcgcagcctttttcaaaaagaagctgcttttgagctgcattttccacaccttcggcaatcacctgcaaagacagctgatgccccatggcaataatagctccggtaatttgctctgatttaggatgggtctgaatatcgtcaataaatgatttgtcaatcttcagcctgtgaatcgggaagtccttcaaatagctaagagagctgtgaccagtaccgaaatcgtcaatactgattctgattcctaattctgttagggatgacaaaacctttttggagtgatcgagattgtccattgtcatgctttccgtcacctccacttcaagaagctgcggaggaagctggtatttattaagcgtatccttgatgaggggaatcagatctttagattgaaactgtctggcggaaatattaatggcgacagaaagatcatagcctttgtcatgccaaatccttgcctgcttgcatgcttcatctataatccactttccgatatcaataataagtcccgtttcttctgcaacaccgatgaattctccgggcggacgcagttgcccgtctggtgtcacaaggcgtatcagtgcttctgctcctgtcattttttgttttttcacactgaattgcggctgataatgcaagacaaatctatcgttttcgattgcttctctgagtaccatctcttggttaagcttaacggtttctttgttgccgattgaaaaagaatagtatctgtatttgcttttgtttcgttctttagccgcatacatcgccatatcagcctttttcatcaattcaaggccatccgtcccgtcttttggagatatcgcaatcccgatactgacagatgtgacaagggtgtgatcttgaattttgaaaggttttttgaatttttggataatttttcttgctaaaacatctgcttcgcctgttcctgtattggcgtctgttaatataataataaattcatcaccgccaagacgggcgataaatccgttatcagggactacagatgacaggcgtttagctgcaaactgaagcaattgatcaccgacattatgccctaatgcatcgttaatcactttaaaccggtttaagtcaagaaagaatacaacagtgttataatgcaaggaatgctcgcgattcagcacctttgttagatgagagatggcatgccttctgttaggtaagtctgtaagcgaatcataatgagccattctatggatttctttttctgctttgtactgcttcgtcatgtctttacaaatgacataaatgctgtctagttcctgattgacctcaacaggtataagcgtaatatttaagtgaaactggcctttttcagtgataagatcgctatcgctgttcatcgcttgtttatcttttttaacttgctcaaaaaggcgcttaaccttcagtgatgtgtaattcctccagtcatgcatgctgaagccaaatttgctgatcatttcctcaccagcgtgattggaagatattatgtctccttctaatgataaaataaaaattgcatcaatattgtggacgattaaagactgaaatcgctgttcgttatcctttatgcgttcgctctgtttaataaactttcgatctgcatgggaactgaataacaataacgtttggatacaaaaaataattaaagtaacaaaaattgaccaatgaaacgtttgcacctccatatggcttccgggcggagccatgtccttatggaaagttgccgcaagcatccctgtgtagtgcatgcccgaaatcccaatgcccattacaattgaactgacgactttatagaatataagatgctcagaatgtttttttacggccaagtcaaagaatatttttaacgagacgaaagaggctgcaatcgcaatgataattgaaactgtaaataaaatcggttcgtaaataatcattacccgggaaatggcagacattccgatatagtgcatagaagcaatagatgcgccaagcacaactgatccggtaagcagtctgtaatatgtaagaatgtgccggctgacaaaatataatgacacaaatgatcccgaaacagatgcgccaatggctgccattaaaggcatgaattcatattccatcggcatttccatatggacggccatcatccctacaaaatgcattgaccaaataccgaatcccataataagtgagccgccgatcagccaaattttactttttaagcctgtattgatggtgactttccttgaaagttcaagggaaatatacgaggcggtacaggcaattagaatagataaacatatgagagtcgtattatatgtaacgtgtatttccaaatggagattccccccgtatcgtgtgttccagtcttgttgactctctttattatcggctgcttaaccgcagagtttcagccttcaaaacgatagaaatacgagggagatctatttttagttcaactgaccgtgaaaaatgtgttaaaatcatcttgacgttttccgaaaaaacaaaaatgtataatacataaacatgaaacaagggagttggtggctatcgaagagctggttatgtcatggatagaagcatttaaaagcttatcttattttggaatatttctagcgctcagtattgagtttatcccggccgaagtcgtcttgccgcttgcgggctattgggtatctaaaggcgatatgacacttgccggcgttgttttggcaggatcgcttggaggagtggccggtccgcttacgctgtattggataggccggtacggaggaaggccgtttcttgaacgttttgggaagtatctctttattaaacctgaagcgcttgataagtcagataaatttttcaaaaaacatggtggctttgtcgcgttcagcggccgtttcttgcctggcatcaggacattgatttccataccgtgcggaattgcaaaaatgaatgtttgggtgttttcgctttatacattcattgctatgcttccgattacatttgtatatgtttatctcggtgtgaagctcggtgaaaattggaaggaagtcggctctattcttgatcaatatatgcttccgatcgggatagccattttggcgcttttcctgctctacttactgatgaaaaagaggaagaaacgcacgcactccgaacaattatctgtatttttgaaaaataaacgttgacaaatcattgcgctgcgcatatcattgacgtataaaatcatatttcttgaaatcccaaaggggagtagcgtccggaatgtattccggaaacaaagtcgtcatttcatggattgtatccatcggctttgttggcatgcctgaattcatgtctagcaagacctttgccttatgtcggcaaaggtcttttttgcatggtccggccggcataagatcggatgaagagaaagaaaacaacttttttgggagggtatcatttatggatgcagcattattattagagtatggttgggttcttctcgtcttgatcgggctggaagggattttagccgccgataacgcgctggttatggcggtaatggtaaaacatttgccggaggaaaaaagaaaaaaagcgttattttatggattggcaggggcttttgttctgcgatttggctctttatttgcaatttctttcttggtcaacgtatggcaggttcaagcgattggcgcgatctatttgctgtatatctcagcaagccacttattgaaaagatatgtatttaagaaagaagacacacataaagagacgaagcaaagcggtttttggccgactgttttaaaagttgagctggcagatatcgcgtttgctgttgattccatcttagcagcagtagcgctggcggttacacttcctgggacatcactcccgaagatcggcggacttgacggaggacaatttctcgtcattttggccggcggtatcatcggactggtgatcatgcggtttgcggcttccatgtttgtgaagttattaaaggaacgtccaagcctagaaacagcagcctttgtgattgtcggctgggtcggagtgaagcttgctttatatacgcttgcccatcgcgacatagcggttgtttctgagcactttattcattctggaacatggaagctgatattctggggtgtcttagcagcaatcgcggtttgcggctggtttatgtcaggtgggaaaaaacagccggagggcgcacaaaacgaacaaagaaacagcacccgtgaacgggcgtaatctgaaagactctgcttaaaagcagagtctttttgtgtttgaagcgttttcataagcgaaataaaataacatttttataacatctttgttacaaaaaacacgcataaaacccccttaattctttagaaaggcacgaaatcatgtataggacgtcagaatggtttgtcataattgagacattggaaatcaatatttctttttctcctttgcgaatccctatcaaattagctatcattaatgagtagttatagggaggaactgaggtgaaaccagtgcttagccttttgtttaaattgggaaaaaagaagcaaacacttgaaaaagctgttgagagtatacaaaaaggcaataaagatctgcaaaatgaattaatacagcaatataagccatttatcgcaaagacggtttcatccgtttgtaaacgatatatagatgaaaaagacgatgagttcagtattggactgatcgcgtttaatgaagctatagaaaaatattcacctgaaaaaggaaattctctgctcgcatttgctgagcttattataaaaagaaaagtcattgattacattagaaaagaagccagaagcgcacaaaatataaatatcgatttacaggaaggagacgatcaggagtcatcacaaagcctgattgaagccgagctttccattgatgaataccgccgtcagattgaacaggagcagaggcgggaggaaatcctctattttcaaaagcagctcaaggattatggtttatcgtttaaagaactgcttgaaaattctccaaagcacacggatgcaaggcaaaacgccataaaggtggcaatgacgcttgttgaacatgaagaattggccgctatcctgtatacaaagaagcagcttccggtcaaacagcttgaacagcttgtctctgtaagccgaaaaacgattgagagaaacagaaaatatattattgcgatgtgtattatcattacgggtgattatatttatttaaaagattatcttaaaggggtgctgcactcatgagaagagggattatagtagagaaaaataaaaaattcgtcacgttgctgacccctgacggacaatttttaaaagccaaaaatgatcgacacagctatgaaatcggagaagaaatcatgcttccgagtgaaacacgcatgggcagaagggccagcttttttgatttttttaaactgcgccctttcaaaatggggatttttacgatgactgctattatgctctttatttttatagttctccccgttttttctaataataaggcctatgcgtatatgacaatcgatatcaatccaagcgtcgaaatggcgttaaacagcgattatgaagtgattgaactgacgcctctaaacgatgagggacagaaagtcgtgaatgatatagatgattgggagaagactgattttaaaaaggtgattgacgatattataaccgactgcagtgaacacgggtatgtaaaaaaatcgaaagaaatattgatttccactgtttatgaaaacacagaagacaatacatataaaaaggctgtgaaaaaacagctgaatgatgtgactgaaaaatataaaacgacataccgcatggaatctctcgagtcagatatgcaaacgagggaaaaagcgaagaaagaaggcgtctcaacaggcagctacatcaaatcaaatgaaaagaatgacaataaagatataaaagatgactccagcaaaccatccggggaagaggatcaaaagagtgatgaaaatgaggatgaaaacaccgatcaaactgacacccaggacagcaagcaaggagataatgaacagctgaatgatgcggattccggagaccagaaagaagagaaagcggatgaccagattgatgatagtgacaaagataaaaaaataaaggaatcagatgaaaacacaaataccgaaaaagatggggaccatgagcaaaccccaatacaagatcctcaagataaaggaaatgaaaataacggcgttgacaagggccaaagccaatatcacagggactggaacaatggtgaacaaggcaagaaccgttcttcgtccagaagggataacgcttcagaccgacgtaatccaaacggctacagcagtgataatcattcagctaaaaatgaagattcgccgagtgcccccggcgaataaagacctgaatttatttagttgtgccatttaattgtgattgtgcttgctgtaccagccgctttgtcatttctccgcctacagagccgttagcgcgtgcgactgtatcagaaccaaggttcacaccgaattcttgagccacttcgagtttaaattggtcaagtgcctgctccacccctggaacaacgagtttatttctgctcgccatctttttcatctcctttttcgataaagaaattcttaacgcgtatttagtttgaaatatacggggtttatttatgctggcaattgttgtggagaaaaataaaaccccggcctctgagccggggtggcgcagactatagaatgtctgctgtcattttatgtgcggttgcctgaatatggaatgtcaaaatggagaggactgtaatggcgataatctgtctgattttaagccattggctgtcattcagttcttcaaaacggtgacggagacgctctgtctcctgttcggcgatctcctgcagatttgattctttcatagaaggagtatcttggtgatggatggcatcaagcacatatgcgcagctttcataataagcaatcgggctgatgacatcatcagatctgtctgagattgtgttaaaggccacttttaaaatagctcgtatgtgttcaaagtcataaatggattttaaatcacgtacaattaaaagaataactgcctgttcaattgagtattttttgcctagctcagggtgtccgatcagatctttgatatcacgctttacccagttttgaatcgcggttgactttaacgaagtcagctcgcataagttgccaagctctacgatttcatttgtagacagtccgtattcttttttctgtttttttcgttcatatcttgtaagaaattcaggaatttctagatgattggctgctttttctgctgacatgttcgctgattggacgagaatgtcgagcgggctatgttctccttgtccttttagggaatagagcagccgcaccatatcggttcgagagagtttaaaaatgttcattgttcacctctttaaacaatttgacgcggatataggtctatgtataagttcaaaattcaagcgtcagcaaattacattaacatcatacgtcgaattccttgcattttcaaatggatgttttataatttaaatatacgggttcttttgaacttaaaataacggaggttgttatggcgaaaagaatttttctgtttattctaacgaatattttggtgcttacaacaatcgggatcgttttgtctgttttaagctctgttacaggagtcgggacgtactttacagctgatggcggtatcgatccaatggcgcttcttgtgttcagtttagtcgttggatttgtcggttcctttacgtctcttgcgatatccagatggatggcaaagacgatgatgggcgtcagagtgctgaatccgaaaaaacactcgctcagctatgaggaacagcaattggttgatcgtgttcacagattaagccgctctgccggtttaacgaaaatgccggaagtcgggatttaccgttcacctgaagtaaacgcgtttgcgactggaccgtcaaaacgccgttcacttgtcgcagtatcgtcagggctgctggagcagatggatgacgcagcagttgaaggtgtgcttgcccacgaggtcgcgcatattacaaatggtgatatggtaacaatgacgcttttacaaggcatcgttaatacctttgtcttctttttatcgcgtatcgccgcttggatagcaagccgttttgtcaaagaagatctagcgccgatcgttcattttattgcaataattatttttcagattgtcttttcgatacttggcagcctggttgtgtttgcgtattcacgccatcgtgaattccatgctgacaggggaggagcggatcttgccggcaaggacaagatgattcatgcgctacggacgcttaaaagctattcttcccggattatggaagacgatcagacagctgtccaaacgttaaagattaatggcaagaagcgctcttcgcttttctctactcaccctgatttagatgagcgaatcaggcggctggaagctaaataatacaaacacattgttcctctgagagaattctcagaggttttttattttatccattgactaaaatcataaaaaaataagcaagttaagaaaatgtttcgtaaaagcctttaaaaatggacctaatatctttagaataattaccgtacttaaaaagagaggcagaaggattttacatgagattaaagtttggaaaattgatacaggccttgtcaccggcccagctgatcgcattatattattttcttgcagttactgtggccgttatattgctgagtttgccggcggcccataaaccgggggcggattggacgtttattgatgcgctttttacagctgtcagttcagtcagtgtaacagggctgacagttgttgatacagctgatacattcagcacaatagggatttttatattagcatttgttctgcaatttggcggaatcggaattatgacgctcggaacattcatttggctgatcatgggaaaacgtatcgggctgaaagaacggaagctgatcatggttgatcaaaaccaatcccagttttcaggaattgtcaatctgatgaagcaggtactgtttctgatcttgtggattgaattttttggcgggctgattctcggcacatatttcttaacctactatgactcctatcaggaagcttatttacacggattttttgccagtatcagtgcaacgacaaacggcggatttgatattaccggtaattcgatgattccatttcgccacgattactttgtgcagtttattacaatgcttttaattatatttggagcgattggatttcccgtgcttgttgaagtaaaggatttcctgttttcaaagcatcggcgttatccatttacgctttttacaaagatcacgacgattacgttcggctcacttgtcttgtttggagccattggcatctttgccctggaagcaaaccatgcgttcgcaggaaaatcatggcatgatattttgtttttgtccctgtttcaatcaacggcaacccgaagcgggggactggcaacaatcgatatcagccaattatcagattccacactcttttttatttgtgcgctgatgtttatcggagcgtcgccaagctcagtcgggggaggcatacggacaacgacttttgctttgaaccttcttgcgctgtttcattttgcccgcggcaataaggccgtaaaggtattcaaacgggagcttcaccctgctgacttgatgaagtcgcttgttgtcacgatgatggcgatcctgctcgtttttggcgcgacactcattctgaccattacagaaaaacattccctgctggagcttttgtttgaagtgtgctcggcattcggtacaaccggcctgtcgcttggaattacggcagatttgagcagtgttggaaaatgcgtcattatgattgtcatgtttatcgggcgaatcggcatcctaaccttcctgtatctgatcggaagaaaggaaattgaagcgaactatcactatccgaaagaaagagtgattatcggataggcaaaacaccgcatactttgcggtgttttttgattgccaaaaaaaagatgtgtgcctcctgttcagttggagaacctaacttcgacaggtgcaatttacgctcctgcatcttaaaatgtctgaaaactggcgaggaggattcgtatgaagcgtaaagctgaagtgaatgaagccattaaaaataacaatacacctaccgagagcatggaccccaattcatataagacacaatatcatgacgaccccaattttagaggggcaaaccgcaattccaaacagggccagcagggaggcatgtagttgtgaagaaaaaccgtcatagcagagacatgcaaaatcataaaaagcctatgaataaaaaggtgctggaggaagagttctcaagtgaacttggggattacaatgccgggaagatcatcgaaacgctggaagtcaccaagcctgaaaagaaaaaagaaaaaaacaaaaataaaaaacaaaaataaaaaagacctcttaggcggcgtccgcttaagaggtgctttttctattttaaataagcatttttgcccgttcctctgacaaattgcaataagctggtcatcctcagctcaatgaagggctgagcgactgtcttaacaaagttgctggagaggactgatgtcagggctgctgttaaaagcaagaggatcactaagctttgatagtcagtaagccaatcctcaagcccgacctgtcgtaatgtcttaataataaacccgtgaagcagatacacgtaaaatgtccgggttccccatttggtaaagaaataccgtttttgcggaacaagcgctaaaaagctgaaggttgccccaaaggcgagtacataccagccgattcgggatagtccgcttaccagggtaacgtctccaaatgaagaatacggttttgaaccaaacagaaaagaatagtcaaaatcgatgccccagcagatgacgaatactgcggcaagcactccgagcgcaatttgtttgccgcgttttgatctcaataaatcaaaatgatgtttatttaaataaaaaccgacaaggaacatcggtaagaatacgaatgtccgtgacaagctcagcgtgctgctgacaaagtccagataaccgatcagcacggcgattccgcagctgacaaacagcgcccactgctttgaaagctttgaaaaaggatataggagcaggttccaaaagaataagcttacaagaaaccataacgaccattgcggatcaatcgggttcacatttgccatgctttcatcttgcataatgtaataaaagacggaataaatgatttggaaaatcaaatacggaataatcagcttgaccgccagcttttttacatatcccgcccgtttaaagcctttcgcgaaataaccggatacaagaataaatgcaggcatatggaatgtgtaaatgaacttgtagaggtagagcataaaatgattatcattaataaaggaacgaaggatatgaccgaatacaacaaggaatatcaataaaaattttgcgttatcgaaataactgtcccgcgatttactcatagcatcaccttctctttcatcagtcactaagagattattccctgctggtacatattttaaaataaaagatgaaaaaggaatctaaaaaaatgctgattgttaggtcgatgtaaagtgatggtaaggatcgtagaaaatgtcttcgtaatgtaatggcgctgaaattttctgaaatttatagggcaaatgaaggaagttcccgcattttgtagaaatattgagggataggttttgaagaaggagtgtacatgcatggaaactcttggtgtccagacaaactcggagctgcgagaggaactgaatcgcctcaaagaagaaaacgcgcgactgaaaaaggaattgaatcagcatcaagtgattgtcaacaatacgctcgatgctatttttatttgtgataacgaaatgcggattgttcaggcaaatgaagcaacagaaaggatgcttcaagttgactcggaggatttgaaaaagcgttctgttttggattttttgttttcaatcccaaaggatgaactgaatctttccgtaaagaagttttttaaaaaaggctttctgtggaaggaggttccgatcaggcttgattgcggggcaacaaaatacatagagtttctggccaaaagaggtattggcgaggatttcttttttgttgtcatgagggacatatcttctaagaagattctggagcgggaattctctatgaatgaacagctttttaaggacttgtttgacagagcagttgacggaatcgtcctgtttgataaagatggcggttttattgatgccaatttgtccttttgtaaaagctttgaaatcaatcataatgagctgtctcatttatcgttgtatgagttcatagacagcggctcacgaaaagatttcgacaatatctggaaggcgctcaaccgcaagggaaaagcgaagggggagctgcctgtcaagcttcgttcaggagttcaaaaactatttgaattcacgattacatcaaacatcatcagcggtttttatatgtccattatgagggatatcacagagaagcggtctatggagctacagctctttaaaagtgaggagcgcttcagagaaatctttgaaaatgcaatggacgccatcatcatctggtcgaatgacggaagaatcgtaaaagcgaatcaatcagcctgtaaaatttttgagctgccgatgaatttgctgttgaaaagaaagctgtgtgattttctcgttgactcgcagcagaaatacagcataacgaagaggaaatacgcaaaatacggagagatcagagaagagctgctgtttcaaatggggaacggccaattcaaagagcttgaatttacttcaaaacggacaatccttgaaaatcagcatttgacgatcttaagaaatgtaagcgacagaaagcggatggaaaaggagcttcgggaaagcgagctgaaattcagaaaagtgttcaacggctcaatggacggcaatgtattgttcgacaatcaatacaggatcattgacgccaacccgttagcaagccatattttgggactgtcacatgaagagataaaacagcacagcttgttagatattatttctgcttatgaaatagaaaatctggcatcaccggcaaggcagattaattttgatgaaatggacaacgaaattccatttttgctgagcagcggtgataacagaaaactcgaattctcatttaaacggaatattattcaaaatatgaacttggctatctttaaagacgtaacagagcgaaaagaattggaggaacgcctgcgcaaatcagatacccttcatgttgtcggcgaactcgcagccggcattgctcatgaaatcagaaatccgatgactgctcttaaaggcttcattcagcttctgaaagggagtgtcgagggagactacgccctttacttcaacgtgatcacctcagaactaaagcgcatcgaatccatcatcaccgaattcttgattttagctaagccccaagccattatgtatgaggaaaaacatgttacccaaattatgagggacacgatagaccttctaaatgcgcaagccaatctcagcaatgtacaaatgcaacttgatttaattgacgacattcccccgatttactgtgaaccgaatcagctgaaacaggtttttatcaatatattaaaaaacgccatcgaagtgatgcctgacggcggaaatatttttgtaacgataagggcattggatcaagatcatgttcttatctccttaaaagacgagggaatcggaatgacagaagataaattaaagcgccttggtgaaccattttatacgacaaaggaacggggaactggacttgggcttatggtaagctataaaattattgaagaacatcaaggcgagattatggtagaaagtgaagaagggaagggcaccgtttttcatattacgcttcctgtcagacagaatgctgaagaaagaaggaatgatgaatgaactactatacgacagccgagacgccgctcggtgaacttatcattgccgaagaggaggaccggatcactcgtctatttctcagtcaggaagattgggtggattggaaagaaacggttcagaatactgagcacaaggaaacacctaatcttgcagaagcgaaacaacagcttcaagaatatttcgcaggcgaaaggaagacattctccctgccgctcagccaaaagggcactccttttcagcaaaaagtgtggcaggcgctggagaggattccatatggcgaatcccgaagctatgcggatattgccgctgcggtcggcagtccgaaagcggtgcgcgctgtcgggcaggctaataaacgtaacgacctgccgatttttgtcccgtgccacagagtgatcggcaaaaacagtgcgttaacaggatacgccggaagcaaaacggagatcaaagcatttttgctaaacatcgagcgaatctcctataaagaaaaataaaacatatggcacgttcccttttttcacggccgacatatcattttattaagttaaaaaagttggtctgatgaaaaaggaggacaaagcaattgaagccgagccgctctgagaaacttgccgtttttgccgaactgtttgtgaaactgcatatcttatcaagcgctcaaaaagatgaaatcatcaatgttaacaaaaagaaacaaaaaaaccgctgactcggctccaaatgagcaaagtccagcggttttttaatgcaccttttctcctctaaacagctgttcaatctcttcttcatagtttccggtcataatccctttttctgtgatgattcctgaaatgagatcatgaggtgtaatgtcgaaagcgggattaaagacaggcacattggatggagcggtccgaactccggaaatctgcctgacttcctcgggatcgcgttcctctatcgggatatcagcgccgcattcgacctttgtatcaaatgtagataaaggtgcggcgacaaaaaacggaatatcaaaggcgtttgctaaaatagcaagaccgtatgtgccgattttatttgccgtatcaccgttctttgcaattcggtcggctccgacaataacagcggaaatttgtttttccttcatcgtatgggcagccatgctgtctgtgattagagtgacatcaatgcccccctgcatcagctcccaagcagtaaggcgtgaaccttgcaggacaggccttgtttcacaggcataaatgtgtaatcccaaatctttttgtttggccaagtaaaacggagctagcgccgttccatagcggcttgtcgcgattgagccggcattgcagattgtcatgatcctgtcgccttttttgaaaagctgcagggcgttttggccgatcaaccggcacgtttcctcatcctcgacctgaatctgaatggcttcatggacaaggtttgtttttgcttcatttacggaaatcgcgttttcgaccgaatgactcagtctctcaagcgcccatgacaaattaatggcggtaggccgtgagctgtttaaatattgtttgatgtcttccagtctgcggcggaattccgtgacattatctgtttcaatgtttttggcagcaagcgccagtccgaaggcagccgtaatgccgatcgccggagcgccccttactttgagcgtgacaatcgcatcaaatacatcctctttcgtcgtcagctccaaatattccgtctcatcaggaagcttttgctgatttaaaatggtaatagctgtttctttccattcaacagaacgtggaacagcaaatgaatgggtcatgaatagatcattcctttacaagtaacttaaataattcaataacatctgttatcgttttgaattccgaacgtttttcgataaaggctgtgccggtttcgagcgccaagcgttttctgccgattcgtttatcaaacggcacgatcgtatccaggtcagctacatgggcaaggccgatcgtgcgtcgtatcagctcacagcccgcaaatccgattgcttcttcaaaaatatggctgagcgtatcagtgaggtaaccgtcgatgttggcgtaaacatccagactgtccttctgccaggattcactaaacgtctcttcaaacgtttcccagacctttttgacatgttcatataacggctctctgtcagccccgtcacggctgagtgcgttcaaaaataagttggcgataaattgccctacatcaaagccgatcggtccgtaaaaagcaaactcaggatcaatcacctttgtttcgtgctcacttgcgaaaatgcttcctgtatgcaaatcaccatgaatcaacgtttctgcagacgttaaaaatgactttttcagcttagcggcttcgattttaacgctgtcattattccaaagcttttcgacaaaaggacgaagctcttcttcaaaatcatttgtgtcatggtcgaagaaaggatctgtaaaaacaagtctttccgtaatgtcgcatagctctggatttgtaaactgtttaacaagctgttttttcaccttaggttcaagcgcgtaatctgatgagtagaaaagtgtttttcctaaaaattcaccgatgtgctgcgacagatgaggatagttttcacccttaatgagtccttttcttgcgatcttgaggtgagagagatcctccatgacggtaaccgccatttccgtatcagaataaaacactcttggaaccaggtgaggcacatgctcgccctgacggatgagagcgctgctttcgattcttgcacggtcgattgtcagcggccagctttctcccaccacttttgcatacggaaccgcctgtttaatgattaatgctctgtcatgttcttgatcataaatatgaaaaacgtaatttaagttgccgtctccgatctcctggcatgtcagcgtgcttttgcttggaaaaaggccaagcttcaccgccaacgccacagcggagctttcatttaacgtttcgtataaaggtgtttttgtgactcccatcatcataacctccaattatgtaatcacttaatatgtagccgtaaaaaagcctccttctcagagagaaggaggcttaacagtctatgtccgcctctcttatctctcagatcagatctgaatggaattagcaccgtgccttaagagaccagcgtctcggcgcgaaaaagatgcgccccatttcacaatggaattacggtcggttgctgttggggtcaaaaggccaaatccctcgcccaactctcgataagagaatatattcacttgtttgacaattctaatttatcagttgatgaacatggtaacaggtaatttagttagttgtcaatattttttaatataaatcttttctgatatcatcgaaaacaggaatgctctcccgaacttctgcgctttcttgaaggtcgatttccgctcggactatgccttcttcccggccgccttcagcaagtacacgtccccatggatcaataatcaggctatgtcctgcaaattcattatccggatttgaaccggtacaattgcaggctgcgacaaagcattggttttcaatggcccgcgcaataagcaggcttttccaatgatcaaggcggggaagaggccattccgcagaaataaacagcacgttggcgccttttgtcgtatgttttctgatccattccggaaaacggatatcgtaacagatcaatccagagcttttgacgccgtcaagctcaaagtatccgtcttcggaaccggctgataaatacagatgctcatccatcagctgaaaaagatgggcttttctgtactctttaatgatttgcccttccttatccgcaatgtacattgtattataaacatcagaattcttcctgacagcgaccgacccggcgacaatatgaacaccatgtttttttgccgttttcttcagccagctctgagcggagcgcccgtcttcgtcagcgagttcatcaagattggccagatcatatccggtcgtccataattcaggcagaacaagaacatcagcatgtttgctttctttttcgatgaaaaattcagccttttttatattttccgaaggtttgccgtatgaaatatcaaattgaagacaagatatcgtccatttcatctttttaacaccccaaatttttctttacttttttcatttaaccatatatgatgatggactatcatttcaagatttttttagaaggtgagaatagatgaaatttgaacagtctcatgtattgaaggaattgcctaaacaattcttcgcttctctggtgcagaaagtgaaccgaaagctcgcagaaggacatgacgttatcaatctaggacagggaaatccagatcagccgactcctgaacatattgtcgaggagatgaaacgagctgttgctgatcctgagaatcataaatattcgtcttttcgcggctcataccgtctgaagtcagcggctgctgcattttacaaaagagagtacggcattgatctggatccggaaaccgaagtcgctgtattattcggcggaaaagccggtcttgtcgagctcccgcaatgcttgttgaatcccggtgatacgatcttagttcccgatccgggttatccagattactggtcgggtgtcacacttgcaaaagcaaagatggaaatgatgccgctcgtaaaggacagggcgtttctccctgattacagcagcataaccgctgaagtaagggaacaggcgaaattgatgtatttgaattatccgaataatccgaccggagctgttgctacttctgagttctttgaagacaccgtgcgttttgcgactgaaaatggaatctgcgtcgttcacgattttgcttacggcgctgtaggatttgacggctgcaagcctttaagctttttgcagactgaaggtgcgaaggatatcggaattgaaatttacacgctgtcaaaaacgtataatatggcaggatggcgggttggctttgccgtcggaaacgcttcggtcattgaagcgatcaatctttatcaagaccatatgtttgtcagtcttttcagagcgactcaagaggctgcagcagaggcactgttagccgatcagacgtgtgtggcagagcaaaatgccagatatgagagcaggagaaacgcttggatcacggcatgccgggaaatcggctgggatgtaacagctcccgcaggttctttttttgcatggctacctgtgtctgaaggctatacttctgagcagttctcagatcttttgctggaaaaagcgaatgtggcggttgcggctggaaacggcttcggtaaatatggcgagggctacgtcagagtcggacttttaacaagtgaagaaagacttaaggaagccgcttatcgaattggcaaactgaacctgtttacccaaaaaagcattgacaagaccttataacgatgggataattcaaaataatttataaaatctatattttcttatcaagagcaggcagagggacgagcccgatgaagcccggcaaccgacttataaagcacggtgctaattcttgcagctagcggctgagagataagattcggacgagaaacgaaacctctttagacgcgattgcagtttgaagaggttttttgatatggatgaaaatgaaaggagctctggcatgagtgagttattagcgacatatctcctgaccgaaccgggagccgatacagagaagaaagcagaacaaatcgcaacaggattgacagtaggctcctggactgatctgccccttgtaaaacaggagcaaatgcaaaagcataaggggcgggtgataaaagttgaggagagagagggaactcctgcatcagcaaaacaagcggtcatcacaattgcctatcctgaaatcaatttttctcaggatattccggctttgctgacaacagtgtttggcaagctgtccctggacggaaaaatcaaattaatcgatcttcacttctctgaagcatttaagcgtgcactgccgggaccgaagtttggcgtatacggcatccgaaagctgctgggagagtttgagagaccgctgttaatgagcatatttaaaggcgtaatcggaagggacctgagtgatattaaagaacagctccggcagcaggcgcttggcggagttgacttgattaaagacgatgaaattttctttgagactggtctagcgccttttgaaacaagaattgcagaaggaaagcaaatattgaaagaaacgtatgaacaaaccggtcataaaacgctgtatgcggtgaatttgaccggacgtacggctgatctgaaagacaaagcgagacgcgccgccgagttgggagcggatgcgcttttgtttaatgtcttcgcttacggcttggacgttatgcaaggccttgcagaagatcctgaaatcccagttccgattatggcgcatccagcagtgagcggagcgtttacgtcttctccgttttgcggtttttctcacgctcttttactcggaaaattaaaccgatattgcggtgctgacttcagcctctttccgtctccatatggttcggttgcgcttccaagagcagacgcactggcgattcatgaagaatgtgtgagagaggatgcttttaaccaaacatttgcggttccgtcagcaggcattcatcccggcatggttccgctattaatgcgtgatttcggcatagaccacattattaacgccggaggaggcgtacatggacatccgaacggtgcccaaggcggggggcgagcgttcagagccattattgatgcggtcctagaggcccagccgattgatgaaaaagccgaacaatgcaaggatcttaagcttgcgctagataaatggggaaaggttgaagccgtatgacgactcgaaaaccttttattatttgtgattttgacggaaccatcacgatgaacgacaacattataaatatcatgaaaacatttgctcccccagagtgggtggcattaaaagacggcgtactttccaaaacgctgtcgatcaaggaaggtgtcgggcggatgttcggccttctgcccagccgtttaaaagaagagattacaagttttgtattggaagatgcaaaaattagggaaggctttcgggaatttgtagcatttatcaatgagcacgagattccgttttatgtcataagcggtggaatggacttttttgtatatcctttgcttgaaggcattgtggagaaagaccgcatttattgcaaccatgcttcatttgacaatgactatatccatattgactggcctcattcctgcaagggcacatgcagcaatcaatgcgggtgctgtaagccgtcggtcatccatgaactttctgaaccgaaccaatatatcatcatgatcggtgattcggttacagatgtggaggcagcaaagctgtctgacctatgctttgcaagggattatttattaaacgaatgccgggagcaaaacctcaatcatcttccgtatcaagatttttatgagatcagaaaggaaattgagaatgtaaaggaggtacaggaatggctgcaaaacaagaacgctggcgagagctcgctgaagtaaaacgggaattggcagagagagattggtttccggcgactagcggtaatctatcaattaaggttacagatgagcctttaacatttctcgtcactgcaagcggaaaagataaacgtaaagagacggttgaagattttctgctggtcgatcaaaacggagagcctgctgaaagcgggcattctctgaaaccgtcagcagaaacgcttttgcatacacatttgtacaataaaaccaatgccggatgctgcctgcatgtccatacggtaaacaataatgtgatttcagagttatacggagaccaaaagaaaatcacattcaaaggccaggaaattataaaagcactcggcttgtgggaagagaacgcagaagtgaccgttccgattatagaaaatccggcacatatcccgacgcttgcggcactgtttgtggaagagatttcagaagattcaggagctgttctgatccgaaatcatggtattacggcttgggggaaaacagcatttgaggcaaaaagagtgcttgaagcgtatgaatttttgttcagctaccatttgaaattgaaaacactccagcatcagctggttaaataaaaggaggaattgaaatggctacaattcgaattcatgatgaggcaaatacaacgattgaaaatcaagaggaagtggcaagctttctggacagtcaagaggttatttatgagcaatgggatatcacgaagcttccggaacatctctcagagaaatatgacctgacagaagaagaaaaacagcaaattcttgataccttcgaaactgaaattaaagatatctcaacccgccgcggctataaagcacaggatgttatttcattgtcagacagcaatccgaaacttgatgaactgcttgaaaactttaaaagagagcatcaccatacagacgatgaggttcgttttattgtaagcggacacggtatttttgtcattcaaggcaaggacggcacgttttttgatgtccgtttaaaccctggagatttaatctccgtgcctgagaatatccgccattacttcacgcttcaggaggaccgcaaagttgtcgcggtgagaatttttgtcacaactgaaggctgggttcctatttatgaaaaagacagcgtgaatcaataagcatgagatagccccgttcatcgaacggggctttttatatttattgcaaacgccacttttcatactgtgacagttcttttttaatcattgtccaaatcaaacctaaaacagctgcatcgtcaatgaatccaagaccgaggatgacgtctggaatgatatcgagcggcatgacgatatacaggattgcggcagttaacagcaaaagtgttttaacctgtgaacgagggtagtcgccatttcgccaatcgcgaagcatctgaaaaaaagtagtgatgtgctggatacatttttttcggtttttcctcttcaaaattgcttttccgcctgccgctccgagcataattgctttctttttcttcattgggcatacctcctgcctggcggcgtgtttaagatattcttcacctgggtattgttcttctaatcctatcaatatatctattatacctgaaaaattaacttatttaatgaaaatatgtttacaaataaagtataatctgtaataatgcacaataacccaatcaaacttgtttcctatttcttagcggcgaggggtgaagtgaatgggcggttcttctgaacaagaaagattgttggtgtctattgatgaaaaaagaaagttaatgatagatgccgctagaaagcagggatttacagggcatgacacgatcaggcacagtcaggagctggattgtttaataaatgaatatcaccagcttatgcacgaaaacgaacattcccaagggattcaaggccttgtaaagaaattaggcttgtggccccgcagagatgttatgccagcatatgatgcaaataaatagcggcctatcagatgcatatataaagagagagcttttcggaagcgctctttttttctggaaaaaattcatatgaaagggggaactaatgaaggaactggcgattctcattaccgaaatggtcaatcaatttcatgatgcttttatttccttatgcggaatatttggcatttatttaactgacaaagaaatgcatttttgggtgatcggcatttttggcatattctttttcggcgtcactcacgctgtgtttacatggctttctaaatggagtatgacagccttgtcctttatctataccgttacagtcatcattgtcatcgtatttgcgattgagattcagcaaaaggtgacggggagagggaatatggagtttttagatgccacggaaggtataaagggttttttagtattttttatgttttttttgcttttgaaaatgctgttgcgtttcatcaaaatccttttttctggaagaccagcaagcaaatcgaatggcaatacccgatcacgaagataaaaaaccctcctgacatggtcaggggggttatgaagcggatacagggagggtgattgtcacctctgtgcctcttcgcacttcactttcaatatgaatagagcctccgtacatcagcacgatccgtttacaaacaacaaggccgagaccggttcctttttctttagaagtaacaaagggaaggaagatgtgatccagcatttcctgagaaatcccttcaccgttatccacaactttgattatggcttttttatctaaagctcccagggagatcgtcagtttgcctccttcaggcattgactcgaggccattttttgctacatttaaaatcacttgtttaatatgatcttttgtacattttacgagtaagggctgctcggttaaatactgtaattcgacttcaacattgtatagattgccctcagaataaatgatcggcataatttctccgataatgtcctgaagtgagttcagctcccatttttcagctgtcggcttgccgagaacaagaaactcactcactatttgattgatgcgcttgatctcctgttcgataatggagaagtaaagctgatcttcctcacctttatatttcttttgcaacagctgaataaagccgcttatgccggtaagaggattacggatttcatgggctgtgctggcagcaagcgtcccgatcagctctaatttttgcgcctcattttctgagcgctccagctgggtctgccgcttcagcaaataatacagcacgagaataaaaaggatattcagcagaacaataatacatgaaagcggaagcacaaggcttttcgtcagttcttctattgtgaccgggttcggatagactttcatattccagctgatatcatccagatatccgctgacaggtttctgatcctctgcatgagatgcttgtccgctcgcaaaaatcattttcccgtcttggttcacaacttcaatataaacatcagggcttagtaagttaatgagatttttcaaataatcaatttgaatagctgcgacaagataatctgtcacattacgttttgagtccaaaacagggacacaaattgtgaaaattggctgaccagtaattctgctcgaataactatctgaaatgactgtctttttagtttcctttgcttttgtaaaaaaagatctgtcggccaggtttacattcgtttttaattcggttgtgcttgcggtgacgtctcctttggcattgagaaaatagagaccggaaaatctcggctctgaatcaaaggtcttttccaaaattgactgcattttctttatatcaaccggtctgtcaatggcgatggacaaggaggtcattctcgccattgtttctccgattaaataattgattttgttgcggtgaaggtttagcaggacacttgcttcttgtttatgttctgcagctattgtatctttttctttttcatatacgaaaaagctgatgacgattgccggaatcacgaccagtatgatataaagtttgactctcccgcaggcgccttttagtattttcaatttgcatcgctccaacatacacctgattagaggtattatatcattgtttcttcttctttaataagaaaaaataaccaaaaaaattagaaaaaggtgttggcaagcttacattttaaaaaagaagagaaatattggaaagatttttattgacattttggtctttgtttattaatgtttctctgtaacggtttctaaaaggatgattgagacatgacagaaaaatcactgaagttatttatcgtgctgtcgcgcgcgtatcggtctattaacgatcatatgaataagcatattcataagcatgggctgaatccgactgaatttgctgtgctagagcttttgtaccataaaggcgatcagccgctgcagcagataggagataaaattctcttggctagcgggagcatcacatacgttgtagataagctggagcaaaaagaacttctcattcggaaagcgtctcctacagacagacgagtgacatttgcgcaaattactgaaaaaggcatcggtcttttgaacgatattttccctgatcacgctgctgaaattgatgaaatgatcagcgtattaagcgaagaagaggtagagatgtgcaccgaaatgttaaaaagagtaggattaaacgcaaaacagtttcataataagtaaaaaaaggaagcctgatatgtcacaaggcttccttttttgctatttttcatttgtttccgctgcgcctctcggcaaaatgagaacttcaacccgccggtttttgcttcggccttccgcagttttattggaagccaccggtttatactcgccataacccttggcgctgaacacttttgcatcgagcttggggttttcaatcaggagccccataaagtttaccgctctcatgacgcttaaatgccagtttgattggaattcagaatttttaattggcatattatcagtatgtccgctgataatgatatttcttggcgggttaatcacaagaagatttgaaatctcttttgcaagcggcacatcttccttacggatggtcgcttttccagaatcaaagaagatgctgtctttaatcgtaatcagaaggccttcactagtcatcttcgtctccagctgatgttccagctttttatctttgatgaacttttccacctggctcttcacattttcaagttcttcttgatcagctgctttttctttttctttcttgtttttctctttctcttctttttcctttttcacttcatcgatgccgtctgactcgttttcaggaggagtgacactggagtagtccagtacaccggtgccgcctgtaaagacttcattaaatgattttgagagcatttgaaacttagctgcgtcaatcgagctgctcgcgtacagcacaataaacaatgccaggagaagagtaaggatgtcggcgtaaggaacgagccatgattcatcaacgtgctcgtcctcatgcttcttcttcttttttctcgccattttgcgcctctccttgttctgcaaatttcaagcggtccttcgcaggaagatacattaaaagcttttgttcgatgactttcggtgcttgtccttctaaaacggataaaacaccttcaatcatgacctcacgcagttttacttcttgttttgattttcgttttaatttatttgcgaaaggatgccataacacataccctgtaaagataccgagaagtgtggcaacaaaggcggcactgatggcgtgtccaagctcatctgtattgtccatatgagagagagcggcaatcagcccgattacagcgccgagtactccaagtgtcggagcgtacgttcctgcttgtgtaaaaatagcggctccggcttggtgtctgtcctccattgcttcgacttcctctgtcataatatctctgataaattccgcgctttgcccgtcaacagccatgctgagcccgtttttcaagaaagcatcatctacatcctcaatgcttgcttctaaagcaagcagaccttcgcggcgtgcaagctgagcccattcagagaacataggaatgagttcctctattgtgagctgtttattttccttaaataacactcgaaacagcgcaggcacttttttaatttcttttgttgggaacgcaataacgactgctgagattgtcccggcgataataattaaaatggcagcggggtttgcaagggcgctgaaactgacgcctttcagaaccatcccgacgctcaatgccacaaaagcaagaataataccgattaacgaagttttatccatagtttttcaccaaatccttttttactatcttgtctatggttaatatcggttttggtgcccggaactttagggacattgtgaatttgttcatgaaatattcaaggaagaggcatagaagggagaaataaacaaaaacgggctctccaaaattgaaaagcccgggtgtctactgaaattagcagctttcttgcaagctgtccttcagatggtattcatataatagtagaaatacatattcactgtatataaacatgttccatccctccttaaaaaaagtgtaaaggatgaagggaagtagcgcttcaggggaagggacggtattttctaagtcaagagtatgaaagcataaaaaaagcggcttcctaaaaggaaaccgctgattgttatttcgctcgcactttgattttatcatcttctaaaatcacgtgaaaacttgtgatctcgccattatcaagcagcagatcggtcatttcatcctcaacccattcttggatggttcttctaagcggacgtgcaccgaatgaagggtggtagcccagctcagcgattttttctttcgcttcatctgtcacattcaagctaatgccccgttccgccaatgtttcttcaagttctccaagaagaaggctgacgattttgacaagatgttctttttccaatgagcggaactcaataatgctgtcaaaacggttgaggaactcaggtttaaagaacatgctcagtgaatcaattaatgtttgttcttcgatgacactgtcatctgattggaaaccgactttcgtttgtttctcaccagcacccgcattacttgtcatgatgatcacagtgtctttgaagcttacggttctgccttggctgtctgtcagacggccatcttccataatttgcaggaacatatgctgaacgtctgggtgtgctttttcaatctcatccagcaacacaatgctgtaaggattgcggcgcactttctcagttaattgtccagcttcctcatggccgacatatccaggcggtgaaccgataattttagatacggcgtgtttctccatgtattcgctcatatcgagtcggataatagcgtcttttgtgccgaataattcatctgccagtgttttagaaagctctgttttccctacgccggtaggaccgacgaagaggaaggagccgactggtctgtttttggattttaaaccggcgcggcttcgtcttaccgcctttgccactttttgaacagcggcttcttgtccaatcacgcgttcatgaagttttgcttcgagttctttcattttcgtttgttcgtctgcctgcagtttgccgacagggatgcctgttttttgttcaacaatttcctgaatgtgctcagcttccacagtgacagcagtatgagcggaggagctgttcagttttttctccaatgcgagttcttcatcacggagttttgcagccagttcgtaattttcttcttccagggcttttgttttttcggcttcaattgcagttaagcgttcagcggcatcctcatcattcagttcatcaattaacaggttagcttttgaacctgcttcatctaataaatcaattgctttatccggcaggtgtctgtcctgaatgtagcgggatgataaagtgacacacgctttgattgcttcatcactgaatgttacgccatggtacgcctcgtatttgtctttaatcccttgcagaatgaggatagcctgttcaattgaaggctcctgcaccatgacaggctgaaaacgtctttccagcgcggcatctttttcgatttgacgatattctttcagtgttgtcgcgccaatgacttgcagttcgcctctggctagggccggtttgagaatgttgccggcgtccattgatccttctgcagagcctgcgccaacgagaaggtgaatttcatcaatgaacagaatgacattttttcgttccttcagctcagtgatcagctgtttcattctctcctcaaattggcctctgatccctgtgtttgcaacaagggatgcaacatcaagcaaatatagctctttgtttttcagtttgtttggaacatcaccttcagcaatttttaaagcgagcccttcagcgatggcagttttccctacacccggctcaccaataagaaccggattgtttttgttccggcggtttagaatttcgatcactcgcgccacttcatcatcacggccgatgacgggatcaatgagaccggctttagcaccgtttgtaatattttgagccagctcatcaagcagccctttttttccgctttgttttgctgcgctcttttctttcggctggaatgcctgttcaaacggaaatccgaaagattgaggacccatactcattgaaggtttacgggtcagttcgttatagcaagtttcacaaagaaccatctgtttatgaacggaatttatttgcatgttaaggcgaatcgtcgcctcgttttgatgacaatgttgacaacgcatttgccaaaacctccttaataatttgatcttctttgaccaatgaaagtgaataaaaaggtctattggatttgaccttctttgactattagtatacggcaaacttaacggctttcaaaccaatatgctcaaagcagactgaatatttgactatctttgaccaattggtttttaaaaaaggccggtttgtttgaccaactttgattaatagtatactctgaccatctttgactttcaagccttttgcacaacattttttaatttgttacaaagtaaaacatgttttcttcgtcttttcaaggaacttgtctcataggttataaaaaggcatctatggacaaaactgcggttcgttcggaggggagaaatggaacaatcaaaagggtctgcaagtcagcttgcttttgtgtatgtcggcacagtagtcggagctggatttgcgactggcagagaaattgttgagttttttctgaagttcggctggttcggtttattcggcattctcgtcagcggcggaatgtttacgtttctgggcgccaagctgatgatcatttcaaagcgaatcaatgccaagtcatatcaagaaatgaacatctttttgttcggggcggcggctgggcgaattatcaatgtatttatgctgtttgttctcctcggagttacatctgtcatgctttcaggagcaggggcgctttttgaggaacaattggggatgtccgctcagattgggatgcttattacaatcggtctgagcttaattgtgatgactagaggagtaaaaggcattttcggtgtcaatgtgtttgttgttccccttttaatcctcttttcaatgattgtagtggccgactcttttatattcagcgaatcacgaaacgcagctcagtgggtctggccgcatcgctgggattggctgttatcagccttttcttacggggctttgaatttatcgcttgcccaagcagttttggttccgctggcgaatgaaatgtcctcggagaaagtgatcaaaaaaggcgctttaatcggagggacgatgctgacgattgtgctgtccgcgagttttctgtctttgtcaactcttccggatgtatttttgtatgatataccgatggcacaagtggtttatctctttgcacgatctgtccatttgatttatttactcattattttcggagaagtgttcacatcagttatcggtaatctatatggattagaaaaacaagtgcaaagctttcttccagtgaaaagcaaatatatctttgcggccattatgatcacggcttatattacgagccaaatagggtacggcaggcttatttcaacgatttatcccttgtttggctatgtgagcctggccttcataggcgctttgctttgcaaaaaagctcctcggcggcgcagtttataaatatatataatgaaacgaaccgtcactatagagcgataattgatctaggaaccggggactgacttttttattgtcaagaaaaacatcattatggtaagatagcagaagtgaaaaaattgaagaaaatccgtgcgatatgcgggagaggttctagctacaccctctataaaaaactaaggacgagctgtatccttggatacggccttttttatgtttttctagagcaccttccgaaaaaaggtgtttttttgcgtgaattagctgtagcgatgtctctcgccggcgtttttattgcggagaaggagaggaatcatgaaaaaagaaaaagcaattgtcgtatttagcggcggccaagacagcacaacatgcttactgtgggccttaaaagaattcgaagaagtcgaaacggtgacttttcattataatcagcgacattcgcaggaaattgaagtggcaaaatccattgcggaaaagcttggtgtgaaaaatcatttgcttgatatgtcacttttaaatcagcttgcaccgaatgccctgactagaaatgatattgagatagaagtaaaagacggcgaactgccatccacattcgttccaggccgcaatttggtattcttatcctttgcgtctatcctggcttaccaaattggcgcgcgccacattattacaggagtttgcgagacagacttcagcggttatcctgactgccgtgacgaattcgtgaaatcttgcaatgtcacggtaaatctggcaatggagaagccgtttgtgatccacacgcctctcatgtggctcaataaggcggaaacgtggaagcttgcagatgagcttggcgcgctggattttgtgaaaaacaacacgctgacatgctataacggcatcatcgcagacggctgcggcgaatgtccggcatgtcaccttcgttcaaaaggttatgaagaatatatggtgatgaaaggagagcgtgcataaattgttatctcaaatttatccgcaggcccagcatccttattcgtttgaactgaataaggacatgcatatctcagccgctcattttatccctcgggaaagtgcgggagcgtgcagcagggttcacgggcatacgtataccgtaaatataaccgttgccggcgacgaacttgacgattcaggctttcttgtcaatttcagcgtactcaaaaaactggtgcacggaaactatgatcacacgctattaaatgatcatgaagatttttctcaggacgaccggtattcgctgccgacaactgaagtcgtggcgaaaacgatttatgacaacgtacaggcttatttagacactttggagaataagccgacctgtgtacaggtgtttgtccgtgaaacaccgacaagctactgtgtctaccgtccgaaaaagggtggtttgaatggctaaaggaattcctgtattagaaattttcggcccgacgattcaaggagaaggcatggtgatcggacagaaaacgatgttcgtccggacagccggctgcgattattcctgcagctggtgtgactccgctttcacttgggacgggtctgctaaaaaagatattcgctggatgacggcggaggagatttttgcggagcttaaggacattgggggagatgcgttttctcatgtgacgatctcaggcggcaacccggctctgttaaaacagctggatgcttttattgaactgctgaaggaaaataacatccgtgcagcgcttgaaactcaagggaccgtttatcaggattggtttacgctgattgatgacctgacaatttctccaaaaccgccaagctcaaaaatggtaacgaactttcaaaagcttgaccacattttaactttacttcaagagaatgatagacagcatgctgtcagcttgaaggttgtcatctttaatgatgaagatctggaatttgccaaaactgtgcacaagcggtatccgggaatcccgttttatttacaagtcggaaatgatgacgtgcatacgacagatgatcagtcactgattgcacatttgcttggaaaatatgaagcgcttgttgataaggtagctgtcgatgcggagctgaatctcgtcagagtgctcccgcagctgcacaccctgttatggggcaacaaacgcggagtataatagaaaggaagatgaacatgacgacaagaaaagaatcagaattagaaggtgtaacattgctaggcaatcaaggtacaaattatttgttcgaatatgcaccggacgtgctggaatccttcccgaataaacatgtaaaccgtgattactttgtaaaattcaattgcccggaattcacatctttatgtcctaaaacaggccagcctgactttgcgacaatctacatcagctacattcctgatgaaaaaatggttgaaagcaaatcattaaagctgtatctattcagcttcagaaaccatggtgacttccacgaggactgcatgaatatcatcatgaatgacttgattgaattaatggacccgcgctacattgaagtatggggcaaattcacgccaagaggcggaatttccattgacccgtacacaaactacggaaagcctggcacgaagtatgagaaaatggccgaataccgtatgatgaaccatgatttgtatccggagacaattgataatcgttaattattccgttgtgtgatacggagtgtaaaaggaagtggagtcacagtaaaatccgaacattcagcgttaattttcagcgaagtgtgaccggagtgtgacccgcactaagctcaataaaagtgggaaaagtcacacctgaaaatggctctactcatgggaattgtattaaaaagtgtgacctgaggtgcaacctgaactgtgacttttatgcagtgaaaaattgatagtacagaagcagattaaggcgtacaatttgtacgtcttttcttttttatccgaaagaaaatatgcctatctagagatcataggcattaaatattattatcaatatcttcatttattttttggctaagtttctgaaccttctctttaacatttgaaacagctcttttttgaatttcatcaaagttctcctgaatatagtcgatgacacttcttattagaacttcactttcaaaattgaatatctcatttatttctgactgttcttcatctgttaggtgatggtattgaagttgtttagcatttacttcagtagctacatcaatcctaacttagttgttctggttgtacaatttcatattcaccttctgtatacttttgctccgcataatggcttccccattgacagagctcctgcaagataggtttaagagattctccaagttcagtggatgaatattcaaccttcggcggtacttgattatacatctttctgctcacaagtccactggcttcaagctctctaagtgtttgaatcagcattttctgagttatatttgggataatgcgctttaactcactcgttctctttggtccattcattaaaaagtataatacaaggcctttccattttccgccaataacttcctttgtcacttcaaacccacagctaaattttttcatgtctaaagctctccattccacatttattactttttagttactatatcacaaaaaagtgggtacttccgataatgggcttactgaaggatactatatcttgtaagttgttcttcaagtacttaaaggtactagacataaaataaaataattctaaaggagtgttaagtatgggtaaatttgaaggtaaaatagcgcttgtaacgggtggaacaagtgggattggtcttgctacagcacaaaaatttgtaaacgaaggtgcatatgtttatatcacgggacgtagacaaaacgaacttgataaagctgttaaccaaattggcaagaacgtaaccggtgttcaaggtgatatttctaagcttgaagacttagacaaactatatgacattataaagcaggaaaaaggtaagttggacattctttttgctaatgcaggcatcggcaactttcttccattaggtgaaattactgaagagcaggttgatagaacgttcgacattaacgttaaaggaaccatctttactgttcaaaaagcgttatcactattcccggacaaagtaggttctattattgtaacgggctctactgctggatcaattggcaacccagcgtttagtgtatatggagcatctaaagcagcattaagagcactggttcgcaactggattcttgacctaaaaggtactgaaatccgtgtaaatgtggttagtccaggaggtattcttacacctgcctacgatgagctttttggtgatgcacttgaagaagtaatggaaaatagcagaaatactgttccagctggaaaagttgggacacctgaagaagtagcaaacgctgtatctttccttgcttcagacgaaagcagttacttgacgggtgttgaattgttcgtagatggcgggctagcacaggtataatttcactgcgcagagattacaaatagtccccaaaaaaggttaatggggatttacttgaagaagtcgtataaaaaagtcgttttccttaaaggacagggaattcgacttttttatgtttgaatttgattaacgttgtaaattcgcattttcctggggctaccactaaatgacctgtaaaaaagattacactgtgaataaatgtacttaaagtaacgggggctcttgacttttaataaaaaataatatccctgtccttgtattctaatacttttgaaaatatttaaaggaatccttatgtcctgaataaccacataggaaaatatgttgtaggttgctttctttttttgtggggcatcccacacaagctatcttgtgatctcacacctgaacgttttttatagactagtaccgcgacaagttatattacatatacataccaataaagtagacattaaaagtgaaagagaggatggaaatgtgtgaaaattcttttccttgagagtcatcccatgtggctctatggtttaccgaatgggtttagggaagcaggacataccgtaatgatttccggtcctgtaagtcgggaaaatatcactgaaatgatagacgaatttaaaccagatctaatagtatctatgggatggacaccagagcattcaagggaaaagcaggcctggattcgcaacgctactaaaaaggtgaatatccctctcgtttattgggctactgaagacccgctgcacactcaaaactttactatcccgttaattaaaaagatgaaaccagattttgttttcacggttacgccttctctgtgtaaaacttatgaaagcatggggattaaagcagctcacttagattttgcatttcacgaaagtatacatcaccagattaaaccattagcaaaatacagttgtgatatagcagtggtggctaatgcttaccctaattttcttgaagaacatccggaagtgttccgttcgtcctctttaaaaacgcttattcgtcctcttatacggaagggtattcgcattgatttttgggggagaaactgggaaaaaatgagtaaatatataggaagagaaattccccccaattggatccatggataccttgattatactgaagcatataaagtttacagttcagcaaaagtcgttatcggtttgcaaaactgtgaaagccaacttacgcaacgcacctatgagattcttggttccggggggtttttattgacatcggatacaccagcagttcgaggtaaattcaaatctggccgcgatctcatcgtttcttcctccccaaaagaaacattggaaaaggttaaatactatttgaatcatgatagcgagagaaaaaagattcagataaacggtaaaaaggctgtaaagaatgattcctatcggcatagagccgagagaatgcttgaggtgctaaaaagcagaggaattataagaaacttaggggaaaccattcattatgtagatgttctcaaagaaaaatacctgatccatcatgttactcccggtgaaacattatcaataattgccaggaagtataatgtttccctgcagcaactcatggagcttaatcatttcaaatcagatcaaatatatgctggacaaatcattaagattagagagaaactgtttagaaatattaataacaaatttttctaaaggagagtaatatgaatgaaggagagaataccaaaaaaggaaatagagcgaataaagtaaaaagaacgcctcgttatatggaatttcccgtgacatacgaagtatataatgtggaatccggcgatacattatggacgattgccaaatcctttaaaattccggtacaacaacttatgaatcttaataagctttcttcagatagaatttatcctggacaaattataaagataagagaaagataatctttgaggtttcggaaacgaatcaaattgaaatgacaatccttatttttttatttgtggggaacttgatatttttggggatgaaggggttatgagatgtttcaaatgagctatttctattctggattaggatgggattttattcaacacgttgatcaaacgaacggagtattaaatgttgtgtctcctgattttttctatatcagaaaagatggatcattacttctccgttcagctaatcccgatgtgattaaagctcttcatagaagaaaattaaaagtagttccttttctaagcaatcattgggatcaggatttgggacgatttgcattaatgaaccgagttcgtttagctaaacaaatttctcatgcaatagaagaactggatttggacggaattaatatcgatatagaaaaccttacagaaaaagatcggaatctatttacagattttattagattagtaaggaaaagtattcctaaacataaagaagtatcagttgcagtggcggcaaatccttttggctggacgaagggctggcacggatcatatgattacgagtatttagctaaatatgcagattatcttatggttatggcctatgatgaaagccgccttgctgggcctaccgcaagtgtaggatgggtggaaaagtccattcaatatgttctgacccaaaaaatctctcctcaaaaactagttttaggattgccattctatggccgctgctggatggaaggccaatctgcctctcaagccattcccctttaccttgttgactccttagtaaaaaggcatagcgggacaattatttttgacaccaagagtcaatctccaaaagctatttttactgtcaatcacgataacaaggggccgttgccttcgggaacatatacattatggtttgaaaatgaacagtcactcagagcaaaaataaaactcgctcaaaaatataatctgaaaggtcttggcagctggagtcttggacaagaagatgtgtcagtctggaatacagtgtttaaaaatatataatgatttatagttcagaacaaaattcgaagataattgcaatgaatctctaaatggacatactgaaaggagtttattacgagtgcgggtaaaacagtgagggcattccataggcccttctcccgaaatgttctatacgaggcattacattgggcttgaaatacacattcaaacttatgttatagtacgcatttcaagtaattacggatgtgttgaatttattctgcttccatgatttaagtcatacacatgctacttgatagcaggattattgcatttcattcagaattgttcaggatcgatatggaagcgcacgaataactagaactttaaaagcatacactcatatacttcctgaatggatgctggtttatctaaaaaacatgatgagaattgattgaccgctctcattaaaggatggagaaattcaaggcgccaaggtacgcatggtgaaacatgacttgttgataatcgaccatatagtttctccttagaaatgagggggtttttacataaaaaagacgagcgaatccggggggaattccactcgccgctttctaatgaaaagacgggatgctggatggcagctcgtctgttttattataatttaacgaacgtatgtttgtaaaggtgtcttttcgaatgaattggttcatataaccgttaagaacagattcattgtaaacattcgctaaggtatgctaagatgcatggactataaaggagtgatatgaagtgaagacattgcggttaaacaatgtaacgttagaaatggctgcatatcaagaggagagcgagccgaagcgaaaaattgcatttaccttaaacgttacgagtgagacttaccatgatatcgctgtcctgttgtatgaaaaaacgtttaatgtcgaggttccggaacgcgatcttgccttccggggggaaatgacaaattattcaacatcattgaccaacctgtacgaaccaggggccgtcagcgagttctatatagaaataacagaaatagacaaaaacgccgattcatgatcggtgttttttatgtaaaaaagctgccggccggcagcttttgagaaagcgaatttcatatgtaaggtgttaaattgtccgtcttgcagttttttgaataaatgtggaaataaggaggttttaataggagtctctgatgatcttataatttttatgattaacaactgtcaatgaatctaactcaagatcccgatagttatccatgatcgtcacatcaacgataacagaattctcatttactttttcaacaacaccggttaatccgtttttaaattcaatgacattcccaaccttagcgattttcacaagcttcctctcctttaaacataataatgccttttgaaagtattttgcagtattttcattgagaagtaaagcgataaggagttttatctcccttatgaattgtcctgtcgctataaagatgatatattgattttcgtcaatagaaagaaaaggggggaatttttgttgcgtcccgaagaaataacagaaatgattgaacagctgcgcaccggcgccataaacgaactgagagtccagaaagagcattttcttgatttcagggccgtgttatctaaacaagatgattttaaacatttccgaggaattgcccagcaaggcggagatgttatctttcaatacttagaacagccaagaagctgaaggtttctcatacgtgagaagcctttttatcatatatgacagaacacaagccttttattacagctgtctgtaacaggtgtaataaaatgtaaagtgtcaaaaatggataaacatgttttaatttgacaatatttatagaatttcaaactgtttttttgccattaagcagtgagtcatcctctttattccatcctgatacctccttgggagagttggaaaatctttttccgtgaaaatgaatggatctcttgttaaggttatgaagtgttttttggagcactttaaggaggaaactgtatgacaacgaaattcactgctctggctgtttttcttctttgtttcatgcctgcagccaaaattgagcatacacaagcttcactactgagcgcaaagaagacaaaacatgaagaagcgaaatggcttacacatatagatcgaaatacgaatgaatctttcccttcactgtctgctgataaagacaagaaaataaaaccgattaagctatcagcacacactgaaaagaaagagaaagataaaccggacaaaacaaatgatgagaaagaaacatatacacagtctgaaaaagagttgctgtcacgtctcgttcacgcagaggccaaaggagaatcatataaaggcaaggtcgctgtagcaagcgttgtactgaacagaacggagaaaaaaggttttcctgatacgataagaggagttatttatcagaaaaacgcctttgaaccggtcgcaaacgggagcattaaccaaaagcctgataaagaatcgattgaagctgccgaagaagcgctgtcctcaaaaaatagagaaacagatgccatattcttttataatccgaaaacagcgtcagataattggattcgttcaagaaaaatcgtagaaaaaatcggcagacacgtttttgccgtctaagcatagaagagacaatttgtctcagctgtgcttttttcatataaagagtaaaaataaaataatttttgaacttgtctcatatgatgttggtagtacaagagacaaggagagacatcatgaatcgatttgtgaaagggatcattcttttatccattgccgcctttttcgctgaatgccttgaatttgtcgtcaatatgattttggcgcgggagcttggcgagcatgggatggggctttacatgagtattttgcccacgatctttttaattattgtcatcgcgagcctggaactgccgatatccatttctaaattcattgccgagtcaaatcctaagcttcatgaaagcatgctgaggcacgctttcagaatgacagccatttttactgctttttctactgtcgccgctagtattgcgcttccgtttataccggtatttgatacataccacccgtttattaaagggattgtcatcggcttaattcctgttgtcgcctttacttcaatcgccaggggctactttatgggtgtgcagaaaatggggaagatcgcaattgccaatgtgctgaaaaaaatcatccagctcttgtgcttattcctcttttttcaatggtactcatttgaattggacatggctgtgctgatttccttgtttgttctagtcgtgagtgatgtggtcgtgcttgtttatttatattcacaatttatcatggcaaggcgggcgttatccggccagcagcacattcatttgcgcggaaaggatgtaaggaaaagactgcttgctgtttcaattcctacaacaggactgcgtatttttcatgcggttgtcaatgcaattgaaccctttttagtaaaaggagctcttttggctgcgggcgttgccgggacagcggcgatcgatcaatacggaatgctggcaggagtggctgtgacgatagggtcgttccctgcttttattgcccattcgttaatggtcgtcatgataccgagtatttcggaagcttatgcactttctcagtatgacatcgtgttaaaaaggctgaagcagtcgattttcattacattaggttacggtatacctgccgtctgggtcatgttccagtttgcgggacctctcacgcatttgttttttcactctcctgaagcgcagtattatttgcagctgttgtggccttactttctctttcatctgtttgtcatgccgctgcaggcgtgcttaatcgggatgggttttgtgaaagaggctttttatcacaatgtatggagtcatatcgttgcgctaagtatgatgtatgtactgggatcaatggagaatctgcaaatgctcgggattatccttggaatgaacactggcatgattcttttgacgagcctgcactatgccacgatctgcaaagcattgaaggtatccgtattccttacgggagggaccagaacgccgcgaattgaaggatgatataggaactgcaggggcaagctaattgaaaagcatgaaaggaagattccatgttgacgaagcgcttgcttactatatacattatgttattagggttgattgcatggtttccatgtgcggcacaagctgaggaaaaacagcctgctgttcccgctgtttttcttatgaaaacgatagaaggggaggacatctcgattccgaataaagggcaaaaaacaattctccatttttggacgtcatggtgtccgccctgcaaaaaggagcttccccagtttcaatcgttttatgatgcccatccatccgacagtgtaaagctggtaacggtgaatttagtgaattcggaacaaaatcaacaagtcgttgaagattttattaaagcaaacaagctgacgttcccgattgttcttgactcaaaaggggaattgatgaaggagtatcatatcattacgatcccaacatcatttttgctgaatgaaaagggagaaattgaaaaaacaaaaattggcccgatgacagcggaacaactgaaggaatggacggaagaatagctgagagcatagactctcagcttttttcatatagagaagaagcgaataaacattaatgataattattatcaaaaagaaattaaaataattataattgaaattctcttcgtgcgtgctataataaaggaagacatcaagaaataactgacgataaagctgccttttgggcagcgattttgtttttataagagaaatgaagatgatttacgttctcaattagagaggagaattcgatatgaatgaacaagttatcgttcaacgcgacccgcatgagccattgaaaacagacaagagggaaaaaaactgggcacagcacgcggagcttattgcagcacttgtatcaggcgctcttattttggcaggctggctcttatccggatatcaggtattatccataatacttttcttgctggcttttgtgatcggcggatttgctaaagcgaaggaaggaatcgaagaaacactcgaagccaaaacgctgaatgtagaacttttaatgattttcgctgccgttggttccgccttgatcggatactgggcagagggtgctattttaatatttattttttccttaagcggagctttagaaacatacacgatgaataaaagcagcagagatttaacgtctttaatgcagcttgagcctgaagaagcgacattgatggtcaatggtgaaaccaaaagagttccggtttcagacttgcaggccggtgatatgattgtgatcaaacctggagaacgcgtagcggcagacggtatcattgaatcgggctcgacaagtcttgacgagtcggctttaacaggtgaatcaatgcctgtagaaaaaaacacaggcgacactgtattcacaggaacggtgaatcgcaatggctccttgactgtccgtgtcacgaaagcaaatgaagattcgttattcagaaaaattatcaaactggttgaatcagcgcaaaatagtgtttcacccgctcaggcttttatcgaacgatttgaaaatgcttatgtgaaaggtgtgctaattgcggtggcgctccttttattcgtcccgcactttgcgctgggctggagctggagtgaaaccttctaccgcgcaatggtgtttatggttgtcgcgtcaccttgtgcgcttgtcgcctctattatgccagcggcgctgtccctgatttcaaatggcgcccgcaacggtatgcttgtgaaaggaagcgtctttcttgaacagctgggctcagtgcaaatgatcgcctttgataaaaccggcactgtaacaaaaggccagcctgccgtagagacgatcagaatagcagaaggattcagtgaagcggaagttcttgaggctgtctatgccatcgaaacgcaatcaagccatccgctcgcccaagccataacggcgtacgctgacagccgtggcgtgaatcagtccggctacatatctatagaagaaacctcagggtttggcgttatggcagaagtgtcgggtgcgatatggaaggtcggtaaagcaggttttatcggcgaggaaatggcagcacaatttttgaaacaaacagcatccgatgtcattcaaagcggtcatacaattgtatttgtgaaaaaggatgatcaaatagtatgctgtatcgcactgaaggaccaaatcaggcctgaagcaaaagaggtcatggaagaactgaaccgacttgggattaaaacggccatgctgacaggagatcacgaagacacggctcaagcgattgccaaggaagccggcatgacaactgtcgtagcagaatgcctgcctgaccaaaaagtgaatgaaatcaaacggttaaaagaagaattcggaacgattgcaatggtgggtgacggaatcaatgatgcgccggcactcaaagcggcggatgtcggcattgcgatgggcggcggaacagatgtagcacttgagaccgctgatatggtcctcatgaaaaacgatttgaaaaagctcgtaaacatgtgccgcttgtctcggaaaatgaacaggatcatcaaacaaaatatcgtgttttctctagctgtaatctgcctgctgatttgtgcaaactttttgcaggcgatggaattgccatttggcgtgattggtcatgagggcagcacgattttagtcatactaaacggtttaagactcctaaaataaagccagcagcctaatcaggctgctggctttttatgtatcaagctttcccttcatttttgtctttatcagatcttttcataaccaggatgagagcgaggatgcagcaaaggaaacccgctgcacagcctatgatagagctgtaataataaaagcccaccatcttcatcccgataaaaggagcggaaattcccaaaaccgttaagagcataactgcttttcgtctgaaaaaattcatcagcaaacggaacaaccccctgcgattgaacgttactgtcagtatacaggaagaggagcaggaaataaaatgcattagaaaatgaaggcgtcgtgaaaggcaaacaccggtaaaacctgttacaatggaagacagaacaatgcattgcaaatggcagggaggaacaagaagtgaatagaatacaacgcgtctcttcatggctgaaggaagcggggcatactgccgcatttattcatacaaaagaaaatgttttttacttaaccggtttttacacagagccgcatgaaagattaatggggttatttatttttcaagaagaggagcctttctttgtttgtccaggaatggaagcaggacaggcccgcaacgcaggctggaatcatgaaatcattggctatgcggatcacgaaaatccatgggagctgatagagaaggccttgaaaaagcgaaatatcagcatacatacgcttgcggtagaaaaggattcaatctcgctatcacgtgcagaacagctgaagcatgcgacgggcggggctcaatttgtttcagcagaagaaacactcaatcaatttcgcctgattaaagaagacaatgagattcgtttgctgaaagaggcggcaaagcttgcggattacggtgttgaagtcggcacagccgctttgcgtgaaggcatcagtgaagtggaagtgctcgctcaaattgagtatgagctgaagaaaaaaggaattcagggcatgtctttctctacaatggttttattcggagaaaaatcaggccagcctcatggaaatcctggtacagccacgttgaagaaaggtgattttgttttatttgatctcggtgttattcttgacggctattgctctgatattacaagaacgtttgcatacaaaaccatcaatccgaagcaggaggccatttacgagactgtgcttcaagcggaaaaagccgcgattgaggcaagcaaacccggtgtgagaatcggagatctggatttaacagcccgtggaatcattgaaaaagcgggatacggtgactattttcctcaccggcttgggcatggactcggaatttctgtccatgagtatccatccatgagccaggccaacgatacactgttgcaggaaggcatggtctacacgatcgaaccggggatttatgtgcctgagatcggcggcgtgcgcattgaggatgacgttcacgtaacaaaggacggagcagttgctctgacccaatatccaaaggaattaatcatactgccgtaatagaaataaaaaaggactttgttctcgacatcgtccttttttatctgcattaaataaaaaaatcatcaaatgttcgaaagggtttaatttcatgtttttggttgagaggttttacagcaagacagctgccaccgagaacagtgagacataacccaattaaaatgaagaaacccatgtgatcttctcctttcagcttaaaacacaaaaagatatctggtacgtccatatcatattgtatgaaacgcattccagatcaaggggatttagaaagaagggaatctatggctaatattaaagacattgcagaaaaagccggtgtctctgttacaacggtttcccgagtcataaacaatcatccatacgtcagtgaagacaaacgaaaaagagtgtttgaggcaatggaatcattggagtacacgagaaatattcacgctgtacatttgtcgaaaggattttcaaacatgattggtgttgtcttgccaacggttaatctgccatattttgcagagctgattgcaggaatagccgacgcagccgcggaatccggggttcacctctctttattccaaacaaactatgaggtacaaaaagaaatctttgcgctgtcccaattaaagcagcgccaggttgacggcctgattttttgctcaaaggcgcttgctgatgagaaactcatggaatgggagggcccgattttgctttgccagaattcagataatgcccgcttcccaaccatcagcattcctcaccaagaagcatttcggaacggcttggactatttaattgccaaagggcacaaaaaaatagccatctgtttggcaagaaaaaaaggcatgaacagccattttcgaatcaaagcctacaaagaggcattggaagagatcggcgaggcatttcgtgaagactgggtaattgagaaagcgattacaattaatgatgggaaggcgctttttcataaatggaaaacgtggaaggaaaagccgacggctatttttgttgccaatgaccaagtctcagcagggctttttcttgaagcaaagaaccagcgggtgtcagtaccggatgagcttgcaatcttaagcgttgataaccacgaaatcagccaagcgcttggaatcacaacgatcgatattcagacaagggaaatgggaaagcaggcatttgccatactggaaaaaagaattcaaggacagccaattgaaaggaaagttctggattaccgtctcatcgaaagatcgactgtttagtgaatgcattgaaaaaaggtttgacgtgcattccgttcgttatgtacgatatgaggtattgaatgacaaaggagctgaggatcgtgaatgggtccttcacagtgaaaaaggtactgaataataacgtattaattgcttctcatcataaatacagcgaagtcgttttaatcggaaaaggtattggtttcggaaaaaaacaagatgatgtcattgaagataaaggctacgataaaatgttcattttaaaagacgagaaggaacaaaagcaatttaaaaagctccttgactatgttgatgaaaagctcgttgatatttcaaacgatgtcatctatcacataagaaataggactaatcactcattaaatgaacatattcacattgcgttgacagaccatatcgcatttgcgatcaaaaggcagcagcagggatttgatatgaaaaatccatttctaatggagactcagtcactatatcctgaggagtaccaaattgccaaagaagtcatagatatgatcaatgaaaaagcgggaatctgccttccggaaggggagattggttttatcgctctgcatatccattcagcattgacaaaccgtccgctgtccgaggtcaatcagcactctcagctcatggcgcagcttgtcgaggtgattgaagactcatttcaaatgaaagtaaataaggaaagtgtcaactatttgcggctgatcaggcatatcagatttacaatagaaagaattaaaaaagaagaaccgactaaagaaccagaaaaattaatgttgttattgaaaaatgaatatccgctatgctacaatacagcttggaaattgattaaaatcttgcagcaaacattgaagaaaccagttcatgaggcggaagcggtttatctgacgcttcatctgtaccgattaaccaataaaatttcataaattcagtttatccttataacgtgttactgattcgatcaggcatgagtgattgagggaaaaaaacgggaagttcattctcgttcttttgcgcacccaattttgctcatgcctttttgttgtgtaaaagggcaaatgtaaacggttaaactggaagacttacgcctgtgaattcgttgtcatgatttttagctgtaaggtcagactagtaaaaagaggaggtcaattcttatgtttaaagcattattcggcgttcttcaaaaaattgggcgtgcgcttatgcttccagttgcgatccttccggctgcgggtattttgcttgcgatcgggaatgcgatgcaaaataaggacatgattcaggtcctgcatttcttgagcaatgacaatgttcagcttgtagcaggtgtgatggaaagcgctgggcagattgttttcgataaccttccgcttcttttcgcagtaggtgtagccatcgggcttgccaatggtgatggagttgcagggattgcagcaattatcggttatcttgtaatgaatgtatccatgagtgcggttcttcttgcaaacggaaccattccttcggattcagttgaaagagccaagttctttacggaaaaccatcctgcatatgtaaacatgcttggtatacctaccttggcgacaggggtgttcggcggtattatcgtcggtgtgttagctgcattattgtttaacagattttacacaattgaactgccgcaataccttggtttctttgcgggtaaacgtttcgttccaattgttacgtcaatttctgcactgattctgggtcttattatgttagtgatctggcctccgatccagcatggattgaatgccttttcaacaggattagtggaagcgaatccaacccttgctgcatttatcttcggggtgattgaacgttcgcttatcccattcggattgcaccacattttctattcgccgttctggtatgaattcttcagctataagagtgcagcaggagaaatcatccgcggggatcagcgtatctttatggcgcagattaaagacggcgtacagttaacggcaggtacgtttatgacaggtaaatatccatttatgatgttcggtctgcctgctgcggcgcttgccatttatcatgaagcaaaaccgcaaaacaaaaaactcgttgcaggtattatgggttcagcggccttgacatccttcttaacggggatcacagagccattggaattttctttcttattcgttgctccagtcctgtttgcgattcactgtttgtttgcgggactttcattcatggtcatgcagctgttgaatgttaagattggtatgacattctccggtggtttaattgactacttcctattcggtattttaccgaaccggacggcatggtggcttgtcatccctgtcggcttagggttagcggtcatttactacttcggattccgatttgccatccgcaaatttaatctgaaaacacctggacgcgaggatgctgcggaagaaacagcagcacctgggaaaacaggtgaagcaggggatcttccttatgagattctgcaggcaatgggtgaccaggaaaacatcaaacaccttgatgcttgtatcactcgtctgcgtgtgactgtaaacgatcagaaaaaggttgataaagaccgtctgaaacagcttggcgcttccggagtgctggaagtcggcaacaacattcaggctattttcggaccgcgttctgacgggttaaaaacacaaatgcaagacattattgcgggacgcaagcctagacctgaaccgaaaacatctgctcaagaggaagtaggccagcaggttgaggaagtgattgcagaaccgctgcaaaatgaaatcggcgaggaagttttcgtttctccgattaccggggaaattcacccgattacggatgttcctgaccaagtcttctcagggaaaatgatgggtgacggttttgcgattctcccttctgaaggaattgtcgtatcaccggttcgcggaaaaattctaaatgtgttcccgacgaaacatgcgatcggcctgcaatccgacggcggaagagaaattttaatccactttggtattgataccgtcagcctgaagggcgaaggatttacgtctttcgtatcagaaggagaccgtgttgagcctggacaaaaacttcttgaagttgatctggatgcagtcaaaccgaatgtaccatctctcatgacaccgattgtatttacaaaccttgctgaaggagaaacagtcagcattaaagcaagcggttcagtcaacagagaacaagaagatattgtgaagattgaaaaataagggtgttagtacgccgtgcttgtcagatgacaagtacggttgtatgatataatattgtgaagtaataaagctttaagttaaaaggagaatgataaaaatggcacaaaaaacatttaaagtaactgcagattctggaatccatgctcgtcctgcgacagttcttgtacaaactgctagcaaatacgacgctgacgttaatttagaatataacggcaaaacagttaaccttaaatctattatgggtgttatgtctttaggtatcgctaaaggcgctgagatcacaatctctgcttccggagctgacgaaaacgatgctcttaacgctttagaagaaacaatgaaaagcgaaggactcggcgagtaatgcaagaattaaaagggattggtgcttcagccggcatcgcgattgcaaaagcataccggcttgaagagccagatttaacggttgaaaagaaaaacatctctgattctgaagcggaagtaagccgttttgatgaagcgattgcacgttcaaaaaaagagctcgaaaaaatcaaagagcacgctttgaaagaactgggtcaggataaagctgatattttttctgctcaccttttagttctcagtgaccctgagcttctgaaccctgtgaaagaaaaaatcagcactgattcagtgaacgctgaattcgctttaaaagaaacgtcttctatgttcgttaccatgtttgaatctatggacaacgaatatatgaaagagcgtgcggcagatatccgcgatgtaacaaaacgcgtaaccggccacctgcttggcgtcgaaattccaaacccaagcatgatctcagaagaggttattattgtagctgaagacttaacaccgtctgacacagctcaattaaaccgtgagttcgtaaaaggattcactactgatatcggcggacgcacatctcactctgccatcatggcacgttctcttgagattccagcagttgttggaacgaaagcggcgacaggcacgatccaaaacggcgtgactgttatcgttgacggtatcaatggcgatgtcattattgacccatctgcggaaactgtaaaagagtatgaagaaaaacataatgcttatttggctcaaaaagctgagtgggcgaagcttgtcaatgaaccgactgtctcaaaagacggacatcatgtagagcttgcagcgaacatcggtactcctgatgatgtaaaaggtgttcttgaaaacggcggagaagcagttggcctttaccgtacagaattcctttacatgggaagagatcagctgcctacagaagatgagcagtttgatgcttacaaaacggttcttgagcgtatggaaggaaaatcagtcgtcgtgcggacacttgatatcggcggagacaaagagcttccttacctgcagcttcctaaagaaatgaacccgttcctgggatatagagcgattcgtctttgccttgaagagcaagaaatcttcagaacacagcttcgcgcgctgcttcgtgcaagtacatacggaaacttgaaaatcatgttccctatgattgcgacagttaacgaattcaaagaagcaaaagcgatccttcttgaagagaaagaaaagctcgtaaaagcgggacaggctgtatctgacgatattgaagtcggaatgatggttgagattccgtcaactgcagtcatcgctgatcagtttgctaaagaggttgatttcttcagtatcggaacaaacgatttgatccaatacacaatggcagctgaccgtatgaatgaacgtgtatcttacctgtatcagccatacaacccggcaatccttcgcttaattacactcgtaattgaagcagcacacaaagaaggaaaatgggttggcatgtgcggagaaatggcaggagacgagattgcgattccgatccttctcggcttaggcttagatgagttctcaatgagcgcaacgtctatccttccggcaagaacacaaatcagcaaattgtctaaacaagaagctgagtcattcaaagagaaaatcttatctatgagcacgacagaagaagttgtcgcgttcgtaaaagaaaccttcaagtaatgtacaaaaaccagacggcctccggcctgtctggtttttttcataagtaagggcatagaaggacacaataacatggctaggagggatagtatgtcaaaccaatttaacgcaggagatactgtttatgtgatctacagaaatccgcacgctgccaatgtagctcacataaaggaagccgaaattgtgcaccatccataccatgaaggcgagctttccctgtttatttatgaaacctatcatccgttcgcagaggacgatgctgtgtttgcaagctatgaagaagctaaatcgctttacaaagaactgtttgatattgatccgtatgagtaacaaggaaatcattacaactcatatcctttccgcctagtgagaaaagtaacgttagtaaaggaaaaggatgtggcatcatgcagaacccatttgttccgcagcttgtgtatatagaaccgagggcgctggaatatccgctgggccaagaattacaagataaatttgagaatatgggtattgaaatcagagaaacgacatcccacaatcaggtgcgtaatatccctgggaaaaatcatcttcagcaatatcgcaatgcgaaatcaactttagttatcggtgtccggaaaacattaaagtttgattcatccaaaccctcggccgaatatgccattccgtttgcaacaggctgcatggggcattgtcattactgctacctgcaaacaaccatgggatcaaagccgtatatcagaacttatgtaaacgtcgaagagattttagatcaggcagataagtatatgaaggagcgcgcaccagagttcacaaggttcgaagcatcatgtacgtcagacattgtaggaattgatcatctgacacacacgctgaagcgcgccattgaacattttggccaaagtgatctcggaaagctccgatttgtaacgaaatttcatcatgtcgatcacctattagacgcaaagcataacgggaaaacgagattcagattcagtattaatgccgactatgtgattaaaaactttgagccgggaacttcacctcttgataagcggatagaagcggcagtaaaagttgcaaaagcaggctacccgctaggctttattgttgctccgatttatattcatgaaggctgggaagaaggatacagacatctgtttgaaaagctagatgctgctttgccgcaggacgttagacatgacattacgtttgaattaattcaacaccgttttacaaaaccggccaaacgagtgatagagaaaaattatccgaagacgaagctcgaattagatgaagaaaagcgccgttataaatggggccgttacgggatcggaaaatatatttatcagaaagatgaagagcatgcacttcgagaggcacttgaatcctatattgatacctttttccctaacgcaaaaattgaatatttcacttaaacgggctgttgtgatcaacagctcgcttttttataaaaaggatttttccattccatcaaaacgccgtaattcaatgattctttatcctccaaataattgctgactacacgaataggtgaacgcccgcaacggaggagaaaggacagcacagggtcgtttttcctgccttccatcacatcttcaacgtactgaacagcgctgatctcgtgtgcgtatttataatacaaaggaatgcggccgccgccgagaaggcgttccagtcttttatcaacagtcagctcatacatcgtattcatcagccattttccgattccaagctttcgataatgaggagaaacagaaatatccactacatataaagtatttccatgaggttcatgatttttaatcgatccgttgtcagttgcttgtgcccatgtatgatcaggagattcaggctcaaattgtacaataagagcagtcatggaaccgataattctgtcattgatgagcgcgcataaagcgccttccggaaaggttttgatatggctggcaagctggtcctctgaccacagcaattcctggggaaacggaggagggaaacattcttcttgaagagaaatcagcctctcgatgtcagtctcagtgtagtttctaatggtcagagcctcaaattttctgccgtcatgcacatacatttgttttagtatgatcatcactctccttatgttgtttcattataacgaagattgaattttcagtaaatatattccgattttcttataatttattttttgattattcatttttcaaacgaaagggccgatatagaaattaggaggggattggtttgtttaaaaaacttcacatgaagattgctgtttttgtttcgattatgttaatcatcacagttgttcttttaatgctgtcttcttatttgacgctaaaaccgatgattacagaggatgggaaaaatacaactcaaaacgtgacgcagtcacttgaacaaaatattgaattgcaattaaagagttatgccatttcgttatcaagattggctaatggggaattaacgcatacatttgtaacgaaaccaagtaaagaagcttctcggctgtttcacgatgacattaagcaaatcaaagataacgatgattatgttgcgatggcttacataggcaccgcaaaaaaagaaatgtttacatatccaaaagcggatttcgctgaggattacgatccaacatcaagaccatggtataagcttgcagctgaaaccccggatcaagttgtttggacggaaccttataaagatgtcgtgacaggagacatgattgttactgcatcgaaagcgatcttagacgggcaaaaagtgataggggttgccagctatgacttgaaactctctgctatccagagtatggtcaataaacaaaaggtgccttacaatggatttgcctttttagctgatgcgagcggcaatcttttagcccatccgtcaaatcaaggaaaaaatatatcaaaggatcaaacactgcaaaccatcgcatccgagaaaaaagggatacaagatgtgaatgggaaaatggttgtgtaccaaacgattggcgaaacgggctggaaggtcggaacgcagtttgataccgatcaattaatgtggatttcagataaaatgaatcgggcaaatctttggatatcattgattgcgcttatcataacaattattctcagctacttcctggccaaaacgataaccggcccgatacagcagctgatcgcaaaaacgaaagctgtttccgcaggcgatttaacagtgcgcgcggaatcaaaatccaaggatgaagtcggtattttaacaagagactttaatctgatggttgaaaatatgaaggaaatggttgagcaagtcagactctcttcagggaaagtatctgacacctctgaacaattaacggctgtctctgccgaaacaaatgaaacaagcggacaaattgcaaaagcgattgaagaagtagccgcaggggcatcggaacaggcttctgaagttgaaaccattaatgaaaaatcggaaagcctgtcaacgaaaatcaggcaaatcgctgaggaggcaggcggaattaaagaacgatcaaaatcgtccgaggatgcaagctataaaggacttgacgcgctcggccagctgctgatgaaatcaaacgaagccaatatggaaacgaaaaaggttgaaacgatgctgctggatttggaaaatcaaactaagaatattgaagaagtcgttacagcgatttcaaacatatctgatcaaaccaacttgcttgccttaaatgccagtattgaggcagccagagccggagaaagcgggcgcggttttgccgtcgtagccgatgaagtgcggaagttagctgagcaatcagccctttctacaaagcatatcagcgagactgtgaagcttatccagcttgagacaaaagaggcctctcacgcgatggttgaggcaagcagaatgaatgatgaacaaaacagtgccattcacgaaactggagaggtattaaatacgataactgcagaaatgcagtcactggtacaaggtattgatcacatttacgcggaaattcaaagaatgagtgaagaacagcttgcgatatctgaagctattcaaagcatttcagccatatcacaggaatcagctgccgcagcagaggaagtgaacgcatcaaccgatgaacagcttgtcacccttgagaaagtcaaacactcaacggaaacactaaaacatgcaagccaagagcttatgaacacaattgcaaaattcacattgtaatccaattacatccccaaacatcatttgttttggggattttttattttataagatgaatagatatggtagtctagaaaatgaaggaaaaatgataaattttaactaaaatctaaacgaaacatctgggaggaatgaccttgaaaaaaacaattggttttatcggtcttggagtaatgggaaaaagcatggcatcacatattctcaatgacggccaccctgttttggtgtacacccggacaaaagaaaaagcagaaagcatacttcaaaaaggcgcgatctggaaagatacggtcaaagatctttcgaaagaagcggatgttatcatcacaatggtcggctatcccagtgatgttgaagaagtgtatttcggaagcaatggaattattgaaaacgcaaaagaaggcgcatatcttattgatatgacgacatctaagccttcgcttgcgaagaagattgctgaagcggccaaagaaaaagcattgttcgctttagacgctcctgtttccggtggagacgtcggtgcacaaaacggaacactcgcaattatggtcggtggagaaaaagaagcttttgaagcctgcatgccgattttctctttaatgggagagaatattcagtatcaaggaccggctggaagcggacagcataccaagatgtgcaatcagattgcaattgcagccggtatgatcggtgttgctgaagcgatggcttatgcccaaaaatcaggcctagagccggaaaatgttctgaaaagcatcacaacgggcgcagccggaagctggtcattgtcaaatcttgctccccgtatgctgcaaggcaactttgaaccgggattttatgtgaagcattttattaaggatatgggaatcgcactagaggaagcagaattaatgggggaagaaatgccaggcttgtcgctcgcaaaatccttatatgacaagctagctgctcaaggtgaagaaaacagcggaacacagagtatctataagctttgggtgaaataaaaaaagattgcctgtacgaaacaggcaatcttttttttattattttccgatgaattgttgtgtccagatgcttccagactcaacgtagccaacaccgatgtgagtaaagttagggtttagaatgttttttctgtgtccttcactgttcatccaagcttttactacttcttctggtgtcttttggcccttcgcaatgttttcacctgctgttttgtagctgattccgaaagatttcatcatatcaaacggtgagccgtatgttgggctttggtgatcaaagtagtttttgtctttcatatcctgagattttgcgcgtgcggatttgcttaacgtttcatcaatttgaagcggctttaatccttgtttttgtctttctgcatttgtaagttcaacaacttttttctcatatgcacttacagatgaaggtgcagatgttgttgtgtttgttttttcagcagttgcaggtgctttagaagcagtgttttgatcagcagctgctttttcagtagtcttttgtgcaggttttgccgtttctgtcttttgaacatcctgaactttcacgttagattgcttcgcatgtttttgaagaagctgcttcatctctttttcgtttgcagcgtttaacgttttgatatttgtgttaatatgcagctttttcactgcatcgttaagtgacatgttttgtactgtgttccccgtttttactgtaaccacaggctggcaggagagttctttcgctgatgcttgctgtacgcccccgaatgtgaataatccaaccgcagcggcagcagataaaataaatgctttcttcattagttcgtaacctcctagagttgtttgtttctacagaaaaatcataacatagcttttttgtcataaagattccagcactttcctttgacaaatagagattgtcattttcgtaaagtaaatccgttgaatcactaagaataagggaatcagcggtatatatgattttatcgtaccgttacatagcttccttttttttgaaccgttagttatattttaatgtgtttttatattgacagcttttttttactccttttcgctgtaacaactattacaaaggtgttacaattaatctcagtatatgtaaatatattgaacgatttgagaggggtaaccagaagtgactgaaataggacgtgaaccaaagaaaaagagcaaaggaaacagagcaatcagaatgaacctttttttcctagctgtctttgttctattcactgcattaatttttaagctcggggttgttcaaattgttgaaggcgaacagcatgaagaagacgctgagaaatcaaatgcaaaaacagcttactatcctgcgcctcgcgggaagatgtacgacagaaaccagaaagttgctgtcgacaaccagagcgttccagaaattgtgtatgtatcaacatctagcacaaaaacagaagataaaatcaaaacagcgaagcggcttgcttctttcattcatattgataccgaatttttgaaggaaagggatctttgtgattactggatcgcagctcatccgaaaaaagccgccgctctgcttaaggaatcagaaagcaatctgaaaggagaccaagcttacaagcttcaaatagagcgtgttccggatcaagaattaaaggctattcagcaagatgacgaagaaatggaaactgctgcgatatatacaaggttttcaagcggaaatgcttacgaacctcaaatcgtaaaggcaatgaatccaaataagagcaatagcaatggaaaaaacggagcgctgcttgatgagaagaaaaactcctcgcaaagaccaaaaaatgacttaacatatgatgaaatttccattgtttctgagcatttagaagaacttccgggaatcgatatcgtaaacgattggacacgaaaatatccttatgacaaaaccctttattctgttttcgggggcgtcacgacacctgatcagggcctgctgagcgaccggaaagatttctacttaacaagaggctatgcgaataatgacagggtgggaaaaagttatttagagtatcaatatgaagaatatttaaattcgcataaagaaaaagtggaatacgtagaagataataaaggaaatgtcgtcagccaaaaaaccattgataagggcagcaggggatacgatcttcagctttcttttgacatggagcttcaggcaaaggtagaaaagattattgaagaagaagtaagaaacagccgtgcacgcggaaattacatgcttgacagagcctttgccgtaatgatggacccgaataacggcgatattttatcaatggcagggaaaaagatagatttaaaaaccaacaaaattgaagattatgcgataggggcatttaccacccaatatgaaatgggatcagcagtaaagggggccaccgtgctagccggctatcaggacgggatcccgcattataaatattttgttgacatgccactgtattttgcaggaaacggtaataagcctaagaagtcctatatgaatatgggaactattaatgaattaacggcattgcaaaaaagctcaaacgtatacatgtttaatgtcgccatgcacattgccggtgtcacatacaagccgcatggacctcttcctgctgaccagaaggatttaaacaaaatgagaaattactacagccaatttggcctgggagtaaagacaggcatcgatctgccgcaggaatcagccggtatgcaaactacacctgatgcggtaggggggttaattttagacttggccattggacaatacgatacatatacaccgcttcaaatggctcagtacatctcatcaattgccaatggggggtaccgcattcagccaagaattgttacaagtgttcatgagcccagcaaaaaagaaggccttgggaagaccattgaacaaagaaagccaaacattctcaacaaaattaacaactcagaaagtgacattcagcaggtgaagactggaatgaagctagttaccacttcgggaacagctagaaatacgtttgcagaggatgtttccggaaaaacaggaactgctcaaacattttattacggaacaaatcgtaattggtggggaaaaagcacgtacaatctaacatttgtcggctattatccgtcaaaaaatccaaaagtggctttcagtgttgttgttccttctgtagcgaacgaccacgacccgatcaacaaactcattgccaaaagagctatccacgcctacgcagagctcgaaaaaaaacacagtaaaaaataaaaaacagggtgcacaactaaaagattgtgtgccctttcttttattcaaaaattgacgttcaccataagaatagaaggagaatactcattttctagcgaatcatactaggtaaaagtcaatctgtatatgtcgaaacacgatgatcatgcaaaggagggattctgtggaacaggatacgcagcatgttaaaccacttcaaacaaaaaccgatattcatgcagtcttggcctctaatggacgcatcatttatatatctgccaactccaaactgcatttgggctatctccaaggagagatgatcggatcattcctcaaaacgtttctgcatgaggaagaccaatttttggttgaaagctatttttataatgaacatcatctgatgccgtgcacctttcgttttattaaaaaagatcatacgattgtgtgggtggaggctgcggtagaaattgttacgacaagagctgagcggacagaacgggaaatcattttgaaaatgaaggttcttgaagaagaaacaggccatcaatccctaaactgcgaaaaacatgaaatcgaacctgcaagcccggaatcgactacatatataacggatgattatgaacggttggttgaaaatctcccgagtccgctatgcatcagtgtcaaaggcaagatcgtctatgtaaacagcgcgatgctctcaatgctgggagcaaaaagcaaggatgctattattggtaaatggtcctatgaatttattgaagaagaatatcatgatatcgtgaaaaacaggattatacgaatgcaaaaaggaatggaagtcggaatgattgaacagacgtggaaaaggcttgatggcacacctgttcatttagaagtgaaagcatccccgaccgtctacaaaaaccagcaagctgagctgctgctgctgatcgatatctcttcaaggaaaaaattccaaaccatcctgcaaaaaagccgtgaacgatatcagctgctgattcaaaattccattgataccattgcggtgattcacaatggaaaatgggtatttatgaatgagtctggaatttccctgtttgaagcggctacatatgaggatttaattggcaaaaacatatacgatcagctgcatccttgcgatcacgaggatgtaaaagagagaatccaaaacattgccgagcaaaaaacagaatctgaaattgtcaagcaatcctggttcacctttcagaacagggtcatctatacggagatggtctgcattccaacgaccttttttggtgaagcggccgtccaggtcattcttcgggacatctcagagagaaaacaaacagaagaattgatgctgaaatcggaaaaattatcaatcgcagggcagctcgcggcgggaatcgcccatgagatccgcaaccctcttacagcgatcaaaggatttttacagctgatgaaaccgacaatggaaggcaacgaacattactttgatattgtgttttctgaactcagccgtatcgaattaatactcagtgaactgctcatgctggcgaaacctcagcaaaatgctgtcaaagaatatttgaacttgaaaaaattaattggtgaggtttcagccctgttagaaacgcaggcgaatttaaatggcatttttatcagaacaagttatgaaaaagacagcatttatataaacggggatcaaaaccaattaaagcaggtattcattaatttaatcaaaaatgcagttgaatcaatgcctgatgggggaacagtagacattatcataaccgaagatgagcattctgttcatgttactgtcaaagacgaaggggaaggtatacctgaaaaggtactaaaccggattggagagccatttttaacaacaaaagaaaaaggtacggggcttggattaatggtgacatttaatatcattgaaaaccatcagggagttatacatgtggacagccatcctgaaaaaggcacagcgtttaaaatttcatttccaaaaaaataaaacaacggcttaaacgccgttgtttatcgtctgcattgcttcacgtttttttaatacaaataattctaaacggttcaggccttctctcagcgtgtccagcgagtacgcaaaagacaatcttacatatccttcaccatatgttgagaacgagctgcccggcacgagtgccacaccagcgtcttccaaaagagccatactaaaatcaaatgaagtcattccaaatgatttaatagaagggaagatataaaacgcaccggacggtttaactacgtcaagtcccatagaaacaagacggtcataaacatagtcgagacgttttttgtattgttctctcataattagtgcatcgtcaaagccgtttgtgacagcttcaagcgcggctttttgagaaatggatgaggcacatgacacattgtattgatgaacctttaaaatgtgctttgcaatgtctttcggtgcgaataaaaatccaattctccaaccggtcatgctgtgtgattttgacaacccgttaatgacaatcgtttgatcccgcaaataggttgcgatggagtaatgcggtctgtcatatgttaattcactgtatatttcatcagacaatacgaagacatttctgccttttaagagagctgcgatgcttttcagttcttcttcagataaagtcacgccggtaggatttgacggataaggaagcacgacacacttggtgttggatgtcagagcatcttcaatcagccgggcggtaagcttaaagccgtgtgacgtagtatcaacaatgacaggcttggccccgcacaaattgataataggttcatagcctggataaataggtcctggcataatgacttcatcaccgggagataaaatcgtccggaatgcagcatcaagggcttggcttgcgcctgttgtgatgataatttctgattcagcatcatagttgaaatccgcttttttcttcatataaagctgaacagcttgtctcagctccaggtagccggcattcggagtatatgacgtcacgttttcatcaatggctttttttgcggcagctttcacatgatgcggtgtgaaaaaatcaggctggccgattgtaagtgaaatgacgtcttcgtgttgggctacaagattcgagaatttgcgtattcctgaaatttcgatctctcttgctttcggattcagcaaatgttccataattcatcaccttaacaaatataatgagtttatcctattttaccactagctgatcatttgtcacctttttaactgatatatttcgattgtatgcgccttttttctaaacatacctttcttttcagaaaaaaagaagacaaccagcgatttgattgtctttattgtatcatgttctattattgtttatatgtgccaatttcattaatagccataatcaaaatgaaggtcttcgtgccaaattagatacggaggatgctcttcttgaaggtcagctgattctttcttcatattcaggtaagtttcttcactgatatcctctaaaacagtcatttcgttttctttaaatattactaaggtacccattatttacacccttctttggaaaaatccttgactattttatcactgttagttggaaagtcaatggttattaggaaaaaagtttcttttttgaggaacgcggcttgttgccttcggaattcgattttgaagagctgccattcactttttacaaattacgccgatatatacagtacaatactgaatgcgaatagcgagggattgaattgtcgttacaacaatacgaaattttattggattctggtacaaatgaattagaaattgtgaagtttggcgtgggtgaaaatgctttcggaattaacgtcatgaaggtaagagaaattattcagcctgtcgaggtgacatcagtgcctcactcccatcagcatgtagaaggaatgattaaactcagaggagaaatcctccctgtgatcagtctcttctcattttttggagtagagcctgaaggatcaaaagatgagaaatatatcgtgactgaatttaataaacggaaaattgtttttcatgtcggctgtgtttctcaaattcacagagtatcctgggaagcgattgaaaagccgacatcgttaaatcaaggaatggagcggcaccttaccgggattattaagctcgaagacctgatgatctttttgcctgactatgaaaaaattatttatgacattgaatcagattcaggtgtagacacgtataatatgcataccgagggcttcgatgaaagaagaactgataaaaagcttatcattgtagaggactcaccgcttttgatgcgcctcttgcaggatgaactaaaagaagcagggtacaacaatatcgcttcgtttgaaaatggaaaagaggcatatgaatacattatgaaccttgctgaaaacgaaactgatttatcagaacagattgatatgatcatcactgatattgaaatgccaaaaatggacggacacaggctcacaaagctgctgaaggaaaatccgaaaagctcagatgtgccggttatgattttctcatcgttaattacggatgatctgcgtcaccgcggcgaagttgtaggcgcagatgagcaaatcagcaagcctgagatcagtgatttgattaaaaaagtggatacgtatgttattgaataaataaaaacagccgttgccagaaagaggcacggctgtttttattttaaaagtaactctcgccaagttttttaaagaccggtttatggtaagctggctgctggcgatttggcactagcggcttttctttcatgccgacatattcttgcaataggtgtttcgcttttgttaaagacatttgagctttaggatttcggtacgattgattaagtgtacctaaatgcggaagatgttcgaagtcttctttagttggaggcatgtgaaaatagtagtctccgattgagataagcacgtccgattgctgttggctgaaccttggattttttgaaaaatgaagccctattttctttcctttaccttctttgacaagcttttgcaaagcccgttttttcagcagatataggtatttagggttgggggcggtttttgcatggcggttcacagtgtaaactgcttttgaaagattttctacggttggctgcagatctttcgtatatgcatggtcgtccattatttctctcctttgctcttatcaatttctatatgtttagattatacttttttaaagttgaaatgcaaatattgaatgtaaaaatgcgcttttttctaagaaaaaaagcgcatttttaacctgcattatacagatcttgccttctttttcggctgttcttgaaatgcttcctgaacattcacttccacagcctgagcactgtattttggcagtgcaataaaataaaaaataaaaacgagcaggataataacacccatcccgtaataaagataatcaatgtttgaaacaaacttagggaataacagtgcgactaagccgagtgtcaaagactgtgcaaacatcataaaagggtcctgcatgccgcttacacgtcccatcagttttggatgaacaatttttggcatccaccctccgattgcaatgttgatcggtccgatgcacattcccagtgcaaaagctgccgcgtaatacacccataaaatattggtgtagccgaggacgaagatcagcaaacctgcaatgaaaatcggtatcgacattaaaaagtgcggcttcacttttttagagatgatcgtgccgattacgctgcctgccagcagcccaaacccgagtgcgatcgtaaatacagacgtatgccactcataacggtcaggcgccaatccatatttcattgtaaacatcggcaaaacggcgaatcctccattgacaaatccaaaaatgaagaagccaaaaataagagatgccagcaatttgttttttaaaatatagaggatgccttctctaaagtcatttattgaatccttaacagaagtctttctccagctgaatgcaccgtttggctgtcgggcttcttttggaatccggcagctgcggatcagcagcccggaaatgataaagctgacaaaatcaagaataatggcgccttcaataccgatggtgttgtacataaacgcgcctataccgaccccaaacaccataaaaatgctaaaaagcatctgattaagtcctgccgctttcacataatgctccttcggcagaatggcttgtaccaaactgttttctgccggaaagaaaaactttgttacagcgcttctgataaataagatacaaaaaacaagaggaatattgccggtaaataaagtgaaaaaaagcacgacagtcaggcctgctctgatccaatcacaattttctgccaccttttttctgtcaaaccggtccgcgacgactcccacgatcagaaatacaaatatggtcggaagagaatacatcagctccgccaaggtcgtatatgaaggctggctgctgaatcggtccagcaaaaaaaaagcaaaggccatgttgcctactgtcgtgcccatttgagaagcgagtgctgcgaaaaatagacgaacaaaattacgatttttaaatatatccataaaaacgctccttaccctaaaggtcccactttatcatattataaaccgcctgtttttgaaacaaataagaaaacattaccggttaatcgtgactctcgttccgtttggcacaattgaagcaagttcgatcacgtctttgttatgcatgcgaatgcagcctttagaaacagccttaccaatcgaagcgggattattcgtcccatgtattccgtagtgctgctttgaaaggctcagccaataagcgccaaatgggccgccgggattgcgctggcggttaataatgtaaaactcgccagtaggcgtttgcgttagtattttaccaacggcgatgggataggttttcattacccgattatttaggaacagcgtaagggtcttcgctccgattgagactgcgatatgatacggaattgtataagggtccggcagtccggggatgactatggactgtcctgcggtgagccctgcctgcagtgacggattagcctggagtaatgcagccgtgctgattctgaaatcagccgcgatgctgttcagtgtatcaccttgcttcacctggtacgtaagcagtttcctcatcctccttttttacttataagtattgatggggagcccatcctgctacattaatttgctttttaaggtgaagacagtgatttcaggcttggccagaaaccgcaaaggcagcctggtcatcccgaggcctcggtttacgtaaatatgagtgctgcccgtttgatacattccctctgtgtagacttttccatatggaggcgtaataatcggtccgtaaaaaggcagctgaatctggccgccgtgtgtatggccggaaagctgaaggttcacgggataatctgttgttttcaaggccgcatcaggttcatggacgagaagaatggaaaaaagtctgtcgctcagccttgaaagggtgccttcataatctgggtttcccagcattaagtcatcaagcgaagcaatctcgattttgctgccatctgcgagtgacaatgtttgatagccattgcgatataccgtgaaacctccggccgtcatcaggcttttgtaaacggcagttccatagcctccgtgatcatgattgccgtaaatacaaagcttgccgaagggagcattaagctttctcaataatggaatgactgcctggtggtgctgatacgtatcaggattatcaataatatcacctgtaaaaacaatgagatcaggtttagattcattaattgtaagaatgacagtttttaaatcttcgagagtaaagtaatcactcaagtgtgcatcgctgaactgcacgattttaaaaccgtcaaatccgtgcgggatgagagagctttttattgtgtgttcggttgtctcgatcatatgcggctcgagatacctggcatagccatatcccccgccggccgttaaagccccggcagcaagagcgccgaacattccttttagaaattgtcttctggacatctttttcatttcaaaccaacctttaatagagtttttctattatatcatctgtatctgataaaaatctcatatgagcatgtgctgacagaggcagggatataatgatagaatattattgaatgaatactcattcacaattggagggataaacatggaaaaaaaggcggtaattattaccggcgggtcaagcggaatgggaaaagcgatggcaaaaaaacaggctgaattagggtggcacgttatggtgacagggaggaaccatgaagcacttgaggaaacaaaaaaagaaattgagacctttgaggggcaggtcgcttgttttcaaatggatgtccgttccgattccgccgcttcagacatgataaaagaagcgataaaagcctttggccagcttgacgcgctaattaacaacgcggccggaaactttatttgtccggcagaaaagctgacgcccaatggatggaaagccgttattgagattgttttaaacggcacatttttttgcagccaagcagcggcaaggcattggattgaccagaagcagcagggtgtcattttaaatatggcagccacgtacgcttggggagcgggagcgggggtcgttcattccgctgcagccaaagcgggggtattgtcattgacaagaacgctggccgttgaatgggggagcaaatacggcattcgcacaaacgcgatagcccccggaccgattgaacgaacaggcggtgcggagaagctatttgaatcggaaaaagggatggcccgcacgatgaacagtgtgccgctcggccgattgggcacaccggaggaaatcgccgctttggcagcgtttttgctttctgatgaatcatcctatataaacggggattgtatcacaatggacggagggcaatggctgaatccttatccgttttaaagaatattaatctttggattcaatgtggtataatcagacaaagatagagaagcaggtgataacatgttggatccacttgatattttaacgaacattgatgatgtccttccatattaccaggcgatttttagtgccgaggagcagaaggttgtcggatatgaggtgcttggacgaattttggcagattcagaaatccaaagtctcgggcccttctttttagatgcggggatacccgaagaatataaattagaggttgataacagaattatccgccaggctcttgaccgctttttagagtcggattctgatctgctgatttttatgaatcaggatgccaatctgctgatgctggatcatggtgaaagctttctggagcttctgaaagaatatgaagcgaagggaatcgaactccaccgttttgtgcttgaaattacagagcacaattttgaaggggatattgagcagctctaccatatgcttgcatactatcgtacatacggaattaaaatcgcagttgacaacatcggaaaagaaagcagcaacttggacagaatcgcgctgctctcaccagatctgttaaaaatcgatttgcaggcgctgaaagtgtcacagccgtcaccgtcatatgagcatgtgctgtacagcatatctttattagcaagaaaaatcggtgcggcgctgctgtatgaagacattgaggcgaacttccagcttcagtacgcctggagaaacggaggccgctattttcagggctattacttggtgtctccatctgaaacgtttctagagagagatgtattgaaacaaagacttaaaactgaatttcaccaatttatcacacatgagaaaaagaaactggagaccgtctatgagcactctgaacagttttacaaacgagtgcatcaggctgtgacctctttgagaaaaaacaatctgtcttctgatgatgactttattaaaaagctggcggaagagctgacagattgcagcttcaggatttacatgtgtgatgaagaaggcgatcagctgacgggaaatgtgtttaagcaagatggagaatggatttatcagccggaatatgcggaaaagaactggagttggcgcccttattttctggagaacattatgagaatgagaaatctcagaaaaggttttttcagtgatctgtacagtgatttggaaacaggtgaaatgatcagaacgttttcatatccgatggatgatcagatgtatttatttatagacttgccttattcttatttatatgagcaggacggactgatttaacggctgaaaggccgttttttttatgaaatgaaaaaaatatcaaaaaacgattgacattgatactgagaatcattatcatttaattatagagagaagctactctctgttccccaacccctctatcagatcaagatccgaaaaaacttggcgctacccccgccaagttttttatttgtcaaagcataggacaatccaatgaaacaataaacctaactagtggtaaacgtttaacactgggagaaacattcagtgccgaacacccctgacactgctgcacgggtgaggaggaaaattcgttctgaaatgtttatttcagttccgttgtttgcctctatccagcatgactcccattgattatggccacgcgggacttcaccataacattcaaaagaaggttttgacaaagttgcaaaaaggcattcttaatgctgccaaagattcgaaaaaaattataattgtgtgcatgacattcaaaaaaagcctcaaactaaagaaaaatcgtttttttcactttttttctttgcttaaattcagcagtgaaaatgccatcctgtccgactttatggtatgatgctcaatagaacttgtattataataaatacttgttgatttgaagttgctttttgaaaggagtctttttttagaatgtcacaattaatgggtatcatcacacggctgcaaagtctgcaagaaacagcggaagcggctaacgagccaatgcagcgttatttcgaagtgaatggtgagaaaatatgcagtgttaaatatttcgaaaaaaatcaaacgtttgaactgacggttttccaaaagggtgaaaaacctaacacgtatccgtttgataatatcgacatggtttccatcgaaatctttgaacttcttcagtaagattcctgaaatagggggaacaagcttccgcctttgcaaaagtaatcgaaataaacggtaaggaacatacttgtttcatggttgtaaatccttgaaaaggagtgtcgtgatggctgattcttttctgttttataatctttcagaagcacagatgacctttcaagatgtgatggaacggcttaaagcctttgttcaaaaggacccccgttcttcttatgtgttatcgatcggaaccgattcacaggtttaccgcgattacacaaagtttattaccgcattgcatttgcatcgtacaggcaagggagcttggggctgcttaaaaaatcatacagtcgacagacccatacatagccttcgggagaagatttcgttagaaacggcgtacagccaagaaacggccgctcatattcttgatggacacttaatggatattaccgatctgctcctgccctttaccggtgagggggcggatcttacctttgaagttcacttggatattgggaaaaaagggcttacaaaagatctgatccaagaaatgactggacgtattacctccatggggattgaggccaaaataaagccggattcatacactgccttcagctatgcaaatcgtttcacaaaataatttggctgaaaaagccaaggtaaatgtcgaattatgcggttgacgtttgttatctgattacttattctagcggtagagctgaaagtaagttgtcttgctttcagaggtattcagtataaaacagggggcctgattgcgaatgagtcttatcggtgaacgatttacagaagaagaacaaaaacttctgctgaatatcctgatcaaccatgagtatgccatcgagctattaagcagtgagatcaacgatatagagacagggaccaaaaacgttgacggaaccacctacaaaaaacttgtaacgctatacgaccgatttcgatttgaaaattaatgggacaccctataattgatactccacaaagagtatcttttttattgaaaggaaacttttcgacaaatactgataaagtttatattattgcaatatagggaatgtattgatgatgaaaatgaaaaggggtcgaaaacatgataagcttacaatcagatcaacttcttgaggcaacagtcggacaatttatgattgaggcggacaaagtagcgcacgtgcaagtcggaaataaccttgagcacgcattattagtattgacaaaaaccggatacacagccatcccggttctggatccttcctaccgtttacatggcttaatcgggacaaatatgatcatgaacagtatttttggacttgagcgaattgagtttgaaaagcttgaccaaatcactgttgaggaagtcatgctgaccgacattccgcgccttcatatcaatgatccgattatgaagggattcggcatggtcattaataatggatttgtctgtgttgaaaatgacgagcaggtatttgaagggatttttacgagaagagtcgttttaaaggaattgaataagcatatacgctcgttgaataagtaggctgtacggcctatttttattatatagccagagcgaaaaaaagaaagcgcatacataatttaaacgagaatagggcttgaataagaaactaagattttattagaatgggagataagaaaaacttattgataacaaaaaggaggacgacatgcagcttcaagagcttcatatgctcgtagttttagctgaggaattaaatatgagaaaggcggcagaacggctttttgtatctcagccggctttatctcagcgcttacaaaccattgaaaaggcgtggggaacaaaaatctttttaagatcccaaaaaggattaacggtaacgcccgccggtgagaaaatcattcagtttgcgaatgatgtgacattagagcaggaaagaataagagaaaatattgacgagcttgaaggtgaaattcacggcacattgaagcttgccgtcgcctccataatcggtcagcattggctccctaaagtcctgaagacgtatgttgaaaagtatccgaatgcaaagatctcgctcataaccgggtggagcagcgaaatgctgaaaagcttgtatgaggatcaggttcatatcggcattataagaggcaaccctgagtggaaggggcgcaaagattacttaatgacagatcatctgtatttagtggatactgaaatttcctgcatcgaagatattgcccatacagaacggccgtttatccagtttaaaagtgacagcacttattttcaggaaattcagcactggtggcatcaaaaatttaaaacgtcgccgaaacagacgatattggttgatcagattgaaacgtgcaaacagatggcactgcacggaatcggttatgccattttgccgtctgttacccttcaaaatgaagataaagtgaataaaatgcctcttttagacatgaaagggcatccgatcggtcgggatacatggttattaggttatgagcctgcctttgaactgaaacaagttcaagcttttgtacaagtgataaaggatatgctggaccaggaaaatccattttaaagacagcgaggtgctgtctttttttttatttatctgttgacaatgaaaatcattatcatttaaagtgatacatatgatattgaaaatcattatcaattaatggggtgataacatggctaaagccttgattacatatgccagcatgtcaggaaatacagaagacattgccttcataataaaagatacgcttcaggaatatgagttggatatcgattgtgtcgagatagatgatatggatgtgtcttgcttaacctcctatgattatgtactgattggcacctatacatggggggacggcgatttgccctacgaagcggaggattttttcgaagaggtcaaacagcttcagcttcatggtttaaaaacagcctgcttcgggtctggcgattattcttatccaaagttttgcgaagcggtgaatttgttcaatgccatgctgcaagaggcgggagctgctgtttaccaggaaacactaaaaattgaattagcgcctgaaacggatgaagatgtggaaagctgccgagcgtttgcgagaggttttcttgcatgggcagattatatgaacaaggaaaaaagccatgtttcataaaggagcaactgctgttacggcatcggcgttttctggatattttgtggcggtacaaagagaaggcatttttcattattctttggagcagggctggagaaagctttttcgtttgaaaagtaagatacactgtatcagctacatagggccttacttatttggtgttggtgaaaagggaacagtcattcgttcggctgatgaagggaaaacctggacgatgtcgagctttccgacaaatgcaacagtgtgggcgattaccggcagaaacaacgggtttgtctgcgcccacggtaagcattgtatttatgtatcggatgattttggtgtctcatggcgcgtagccaaaccttttgccgaatttcataatccccctgttatccggtcgctatgccttcacgggggcaatctttttattggcacgcaaatacacgcatattttggcggcatttgggcttacgacattaagcgtgacactgtccaaattgtcaaaaaagaaaaaaaacggatgacggcatccatgctcgtgttcaatgaaaattggctggtggcggcgatgggttctgtgaaaggaaagcacggtgctgtcactgtacggaatcttttgaatggtgaagaattcaccatacaatccagtatgatcagaaatgaagaatcatttcttgatctttcagaggatgatggcattatatatgtcactacaacacaagatgaaaatggtttttcgagaatttaccaggttgatctcgaagcccgatcgttaaaatggttcgataccattaaggggcatggatggagagtggccaatcagaaagagaatttcttttgcgcaggcttgtatgaatgtaaatttgtccagccgtacgaagtttcagcaatgattcattagaggaggaacaaggaattggcgaagattttgctcgtttatgcaacaatgtcaggcaacactgaagcaatggcagatttgattgaaaaggggctacaggaggcggaagcagaagtagaccgtttcgaagcaatggatattgatgatgcccagctgtttaccgattatgaccatatcataatgggaacctatacgtggggagacggagatctgcctgatgaatttttagatctggctgaagacatggatgagattgatttttccggcaaaacatgcgctgtatttggttccggtgatacagcatatgaatttttctgcggagcggttgatacgctagaggcaaaaataaaagaacgcggtggagacattgtgctgccttcggtaaaaatcgaaaataatccagaaggtgaagaagaggaagaattaataaacttcgggagacaattcgcaaagaaaagcgggtgcgctgtctgatcactcactgggaactgctaaaacggctgttcctttttttcttgtctttgtatctttcctttgatacagtaatgaggtagaaaatcaggaggaggactatacatatgaaaatgatggacgcaaatgaaattatttcatttattcaaaatagtacaaaatctacacctgtaaaggtttacgtgaaaggtgagctggaaggaatcaatttcggtgaatctgcgaaagcttttatcaacggaaacactggtgtcgttttcggtgaatggagcgaaatccaaacagcaatcgaagaaaaccaaagcaaaatcgaagactatgtggttgaaaatgaccgccgcaattctgcgatcccaatgcttgatcttaaaaacatcaaagcgcgtatcgagccgggcgcgatcatccgcgaccaagttgaaatcggtgataacgcagtcatcatgatgggtgcttctattaatatcggttcagtcatcggcgaaggcacaatgattgatatgaacgttgtgcttggcggacgagctactgtcggaaaaaactgccatatcggcgcgggttctgtacttgcgggcgttattgagccgccatccgctaaaccggttgtgattgaagacgacgtcgtaatcggcgcaaatgctgttgtgcttgaaggtgtaacagtaggtaaaggagctgttgttgctgcgggagcgatcgtggtaaacgacgttgagccatacactgtcgttgcaggcacaccagctaaaaaaatcaaagacattgatgaaaaaacaaaaggcaaaactgaaatcaagcaggaattacgccagctgtaaggaaaagtttgataaaaaaggcgtggataatatatccacgccttattcgtataggcaggaggaatagaaatgaagaaagaggagctcatcgcaattcgcagagatctgcatcgtataccggagcttggatttcaggagttcaaaacccagcagtatttattaaatgtcttggaacaatatccgcaagacagaattgaaattgagaaatggcgaacagggctttttgtaaaagtgaacgggacggcgccggaaaaaatgctggcgtacagagccgatatcgatgcgctttctatagaagagcaaactggtcttccattcgcatcagagcatcacggcaacatgcacgcctgcggtcacgatttgcatatgacgattgcactcggcattattgatcattttgttcaccacccagtcaaacatgatttgctttttctgtttcagccggcagaggaagggcctggcggtgcggaaccaatgcttgagagcgatgtattaaaaaagtggcagcctgatttcatcactgcgcttcatattgctccagagcttccggtaggcaccattgcgacaaaaagcggccttctatttgcgaatacatcagagctagtcatcgatctggaaggcaaagggggacatgcggcatatccgcatttggctgaggatatggttgtagcagcaagtacacttgtcacccagctgcaaacgattatctctagaaacacagatccgctagacagtgctgttattacagttggtaccattaccggaggctcggcacaaaatatcattgcagaaacggcccacctggaaggcacgatccgcacgctttctgaagaatcgatgaaacaagtaaaggaacggattgaagatgtagtgaaaggaatcgaaatcggattccgctgcaaaggaaaagtgacatatccgtctgtatatcaccaagtttacaatacgagcggattaacagaagaatttatgtcttttgttgctgaacatcaactggcgacagtaattgaagcaaaagaagcaatgactggagaggattttggctacatgctgaaaaaatatcccggcttcatgttctggctcggcgctgattctgaacatgggcttcatcatgctaagctgaatcccgatgaaaatgcgatagaaacagcggttaatgtcatgacaggttatttttctgtttatgccaattaagcacaaatgaaagaataaaattccataaaatgagcactctagtaaacggaggtgttcaaaaatggctaaaaaaattggaattgaacaatcgttatcagatgtagaagctgctttaaaagaaaaaggatatgacgttgtaatgatgaaaagccctgctgatgctcaaggctgtgactgctgtgtcgtaacaggtcttgataataatgtgcaagggatagccgatacggtaacacaagcacctgtcattacagcttccgggatgacggctgaagaaatttgcagcgaagttgaaagcagaattcagtaatataaaaaccgaagcaaaaagcttcggttcttttatttattctgtttctttagggaaagcgcggtcgaacgcgttctttatttcttttctcaacactcgttcgactcgccactgttccatattttctgttttggcaatgaccctgattacaatttcggaagtccccagttcttgaatgccgatgacatttgggccttcttttatttgtggaagagccgctgcagtttcatcacaaacctgctgtaaaatatgaatcatttcatcaatatttctttcagccggcactttaatgtcaacaagagcctgcatggtaccacgagaatgattgctcacgtttgtgatgtttctgttggggatgtaatgcagtgttccgtcaaagctgcggatttgagttgtccttaagccaacctgctcgacaattccgtcaaaggtggaaacggtaatataatctccgacatccaattgtttctcaagcaaaataaaaaaacctgtcacgatatcactgacaagcccttgggcgccaaatccgacagccaggccgacgattcctgcccccgctaaaagagcgcttggatcataatgaaacaaatctagaaccatgacgaaaaatatgaaaatcaatgtataagcaaatatgttaagagtcaggcttcggagcgtatgtgcacgtccgatagacaagctattctgctcctcgaattttgcaaacagatgtttaatgattttcatgcctaatgatcgaacgataaaatagagcaatatcataatggcgagtttaatgagcagaacaccggcatttgtaatcagtcccgcccaatcatattgtttaataaagtccatgttgagctccttttctaattgattgctgcacattgagactagttaccctgtacatgaccatgttaaacgttttattcaaaaatgtcgaagccaaagacatacatgatttgttaaaaattgactcaggaaatctgcttttatataatggcattgcaatataactaaaaatggttaatcaccctttattttcatgcgattttgacctttaagccaaacaataaattggagggatacatatggcagaacgtatggtaggtaaacaagctcctcgttttgaaatggaagcagtccttgcaagcaaagaattcggcaaagtaagtcttgaggaaaacatgaaaaacgacaaatggacagtgctgttcttctatccaatggatttcacttttgtttgtccgacagaaattacagcaatgtctgaccgctatgacgagttcgaagatcttgatgcagaagtcatcggggtttcaactgataccatccatactcatttagcttggatcaatacagaccgcaaagaaaacggtcttggccagctgaaatacccgcttgctgctgatacaaaccatgaggtatcccgggaatatggcgttttaatcgaagaagaaggtgtggctttgcgcggattgtttattattaatcctgaaggggagcttcaatatcaaactgttttccataacaatattgggcgtgatgttgatgaaacgcttcgtgttctccaggcgctgcaaactggcggactctgtccggctaactggaaaccaggccaaaaaacactttaattctttccaagaacgaaaagcggtctagcatattcgttaggccactctgttaaataggagggaaaaagcaatgaaattacgtcagtccatgccggaattgacgggagaaaaagcttggttaaatggtgaagtgacgagagagcaattgattggggaaaagccgacgcttattcatttctggtccatcagctgccacttgtgcaaagaagcgatgccgcaagtgaatgaatttcgtgataaatatcaagatcagctgaatgttgtagctgtacacatgccccgttccgaagatgatcttgaccttggtaaaattaaagaaacagctgctgaacacgatatcactcagccgatttttgttgacagtgaccatgctttaaccgatgcatttgaaaatgaatatgtacctgcatattatgtgtttgataaaacaggacagctccgtcacttccaagccggcgggagcggtatgaaaatgcttgaaaaacgtgtgaaccgcgttctggctgaaacggaataggtatctgactaaatagtatttcctaaaaacctgatcacatcaggttttttatttgtgcaaaaagcaatggaagaagagtaagaagcttatttttccaaatttgggtataggaattgatggtttgtttgattgatacgctagaaaacacagctaatttttgatgtttttcctcaattttagataaatctcatatctcataactcgaaaattgtagatattacactaaatttctttaaagaagtaagtaaaatatatattttcaacattataccaaataaactagaaagccccttaatcccttgagaataaaggactcttttgaaaaataaaacattttcagaaaataaggaatttttcatagagtaaatataatagtaaaatgctaaaataatagttgataaaattacttttgtaatctaatatcttaattaaagatgttaattttgatagggggtacattgaggaatgtttaatgaaagagaagctttgcgcttgcggttagaacaattaaatgaagctgaagtgaaagtcattcgtgaatatcaaattgaacgtgataaaatatacgcaaaattaagagagctggacagaaatggaagcccttccgaaatcaaaaaggatttccgttctgaaaaaaaacctgactctctgccggttctcgctgagcttgcggctcaggaaatcagaagctatcagccgcaatcacagcagcagtctgttcagcctcagcttcaatctatttcctctcttcctgccggtataccagacggaacaacacgaagaagaagaggaacggcaagaccgggatcaaaagcagctaagctgcgtgaagctgctattaaaacattaaaacgccacaacgcggcgattaagagctcggagcttcaaaaagagattgaaaaagaaagcggtcttgaaatccctaatatgacaacgtttatgcaaagcttaattaaaatgtacccggaagtgaaaaagccatatcgcgggcagtacattttagagggtgaaatcgaatctgcagaatcagcaaatgaataaatataaagaaaaactgcttggcatcgctcaagcagtttttttattgaggttttttctgtgaaggtttgttttctttttcaagattaagcttatacacccacttttgataaggcttttcttcagcggctctgtttctcagctcttcgattgtatggctcttggcctggtctgatgattgggcgtgggcaagctgtttttggagcacatgtatctgtttggtgacatcttcaaggatggtctctacatgatatggctgcgcgtaggccgctggagcttcttcttccgttttttctttttgtttcgtgccgccatcaatatcggcaaaatgagaagcaatccaggcatcgctttcatcaagctgccgtttatacgatataatagtttcgtgaaataatttttctttcgttttttctatgtctagcagtctttctttcgtttctatgattcgatctttcatatgatcaacttctattttaatatgttttagctgatattctttttctaccatttgctcttttagacgcccgttttcggcttttatcaattcggcttgctgttttgcctgaagcagtgcattttgttcctgctcaatcgaggcttgaagttcgctgatccgtttatgaagatttttattttcttcttcgattttgactttcgcaatatgaagtttatgtttttcttcgatttcggctctgcgtttataggtttcagcagatagaagctcctgcaaaacaacgattttatcaagcagttcagctcttatttggtgcagggtttggctggtgtgggaggcatgtttttcttttgttgacatatgtgttaattcggcagacagctgctggagtttttctttcatatcggtattttctttgagcagtttgttatttttctgatgaaagtagcttgcttcaagttcagaaatcagcttatggcaccttgaaagctcggattttaaataaaggttctcctgagacacgtcgtggaaaaaaggacctgatcttttcattcgaaccatctccctcatgatgttaacactacaatatgcaaatactgaacagctattcctctttaataaacagacaagcagtagcgttgagcctttgcttttgctatgcttttaacgaaactagaggtgagatgatatgaagcatgtaaacgtactgctggcagggggagcctcgcggcgatttggagaaccgaaggcgtttgtcaaatggaagggcaggatgctttacgaatgcgctaaagaggcacttggagaacaaacggttatcatcagccgtcccgaatttattgatagatttcaagaaaacggtgaaaatgaagtgtatcaagatgctgagccatttcaaggcatggggccattggctggtatatataccgcttttaaaaagacagacggtgatctttatactgttctttcctgtgacacaccgctgatacaaagaaggacgatactggagctcaaacgtctgatgactgccggttcggacgcggtagtcccaatttcagacggacaagtgcagccattgattgcgatttaccacaaacgtatcatgccagttctatacgatcagctttctgagaagaggttgagaatatcagatttattaggcagaatttcggtttgttacgtacaggctgaaaatatcggagcaaacccggcagagtttatcaacattaatacacgtgatgattttagctgtttggaagaaaaatcgaactccctcaagcgggactgacggggcaataacatgataagatgacataaaagataaggagaacaggtttgatggaggaacgttattcacggcaaatcagatttaagcaaattggggaagagggtcagaaaagactggcagacagccatgtgctgattgtcggagcgggagcgctcggcactgcaggagctgaagggctttcgagagcgggagtcggtacgattaccattattgaccgtgactatgtggagtggagcaatcttcaaaggcagcagctttatacagaaagcgatgccaaactccgcatgccgaaagccatggctgccaaagagcatctatcagcgattaacagcgagatacatattgaggcgtatgttaccgaaggaacagccgaaacgcttgagccgctgattgaaaaagcagatgtcgtgatcgacgcgacagataattttgaaacccgcatgctgataaacgatcttgcccagaaaacaaagacaccttgggtctatggcgcctgtgtaagcagccagggaatgttcatgactgtcattcccggagaaaccccttgtctgtcttgtttgtttgagcaaattcctgtcggcggggcgacgtgtgatactgccggcattattccgcctgctgtgcatatcgtttcagcatatcagcaggctgaggcatttaagctgttaaccggccaaatagaagcaatacagcggggttttgtgacatttgatgtctggaacaattcgcatatgaagattaacgttaatcatgtacgccgtgaggattgcccatcttgcggagcaaatgcggtatatccttatcttcaggattggaatacaccaaaagctgctgtattatgcggccgtgatacagtgcaggtaaggtcagaatcattaaaaagaatcccgaaacaggaactcattaagcggctgaaaacaatcggcaaggtcgaggctaatgcgtttttgctgcatattttttacgaggatttcagaattgtcattttcaatgacggacgggcactggtgcatggaacaaatgatgtgaaagaagccaactccgtgttggcaagagtgattggactgtaacaacaggaggggtcagaatgctggagaaaagaacaccgataccggtagacgaggcagttcggcgtgtctgccattttcaaaaacaaggtgaaacagaatgggtggcgcttgaagacagccttcatcggtttttagccgaagatataactgcggatcaccacgtacctgcgtttgaccgttcgccatacgatggttttgctgtcagagcgtgcgatacggcagaagcttcacgtgaaaacccagttcggtttgaagttattgaccatattggagcaggagcagtatctgaaaaagaacttggcccgtttcaggccgtgcggattatgactggcgcgcaaatccctgaaggggcagatgcagtcgtcatgattgaactgactcaaacctttgaggagaatgggaagtcatttatgtctttaaaacgccgctttcagacgggggataatatttcaaaaacaggtgaggacgctcaaaaagggagtgttttactgacaaagggcacccgggtgacaccaggagtgacggctcttttggcaacattcggatacgcatctgtgcctgtcgtgagaaagcctgtagtcgggattatcgcaaccggtaccgaattgctgaatgtcagtgatccgctggaaccgggaaaaatccgcaacagcaatgcgagtatggtatatgcgcaagcgatagaagcaggcgcaacaccgctttatttagggaaaatctctgatgaattggataaaagctttgctgcagttaaagaagcgatgaaaaaggtggacttcctgatcacaactggaggtgtgtcagtcggtgactttgactttttgcctgcgatctatgaaaaactcggagcggacgtgctgtttaataaagttgccatgcgcccgggcagcgtgacaacggtggcgcatgcaaacgatatgctgctgtttggcctttcaggtaatccgtcggcatgctatgtcggttttgaactgtttgtcaaaccgataatccagacatggttgctcaatgaaacaccgcattcgatttgtgcggaagctgttttgaccaaggattttccgaagccgaacccatttacccgatttgttcgtgcgctcgtgcaccatcaggaagggaagctgttggcgacacccgttggcttagataagtcgagctctgtcacatcacttgcagatgccaatgcatttattatcctgccgggcggcacgcgaggctacgaatctggcagaacggttcaagtgctgctcatcagagaagagaatggaagtgaatggccttggtccgtcctttcccgatcgtccaagttgtaggatttcaaaacagcgggaaaacaacgtttattgagcgcattcttgaaaaagcctctgaacaaggagtctgtttgggctgcctgaagcatcatggtcacggcggtgaaccgcaagcgctcacggaaggaaaagacacggaccgttacaaggcggcaggtgctgatgtaacagcggtagaaggtgctggtgtgttacagctgactgcccgccgcaattgggatttggcacggctgatcgagttataccaatttctcgaaacagactgtcttctgattgaaggctttaaaaaagccccttatcctaaagtggtaattctaagtgaaaaggaagatctggaagcgctgcaagcagtaaatataatcgccatcatctatagaaaaaaagagcatatgacagagcatcagggattacccgtttttcatgcggatgatccggttgccgtggattttgtgctttcacagctgaagggggaatctgcataatggaacggtttgagattacgaaaacacccattaatactgaagacatcattaaaaaagtggagaaacgggaagcaggagccattacgacatttattggtacggttcgggaatggacaaacggaaaaagaacggttcggcttgaatatgaggcatatgaaccgatggccgtgcaaatgcttgctcaaatcggcgctgaaatcgaagaaaaatgggaaggtgcctcagctgcgatcacgcaccgtataggtgtgctcgatatcggtgaagcagcggtagtgattgctgtatcttctccccatcgaaaagccgcatatgaagccaatgagtatgcgattgaacgcattaaacagattgtgccgatttggaaaaaagaaatttgggaagacggtgagcaatggatcggcgaccagctagaaacaacagcttatccgaacggaaaaccagatctaagcgagggagaccagcatgattaaaattcttttatttgcaggactggctgaacaggccggtacacaagcaatagaaatagatgtggaacaagcaaccacagatgaaataaaagcgagtctaaaagaacaatacggtcttgaatctattgatacgtctatgattgccgttaacgaaagctatgtaaaagaaaatacctctgtatcttcgggtgacacggtagccgtcataccgccggtcagcgggggatgaaaaccggacggcatttcagccgtccggtttttctgtatttcattggcatatccccaagtatcctcagcatacaatgattttctgtaagcgtttattctacatatgttactccctataaagtaagagactcactccataattagactgaaattttgaaaaataatagaaatttatttcgggtatcgatatagtgaagatgataaatgttggaaaggtgctggatatggagacatttaaaagattaaaaatgtattattggccgtacagaaaagtgtttatgtggtcgcttctagccatgcttttgatgactgcaattactgtcgtttatccgattatcctgcaaattacgattgatgagatcgtgctgggacggcagtatcagcttgcggcgtgggtcagcttaggatttattgcggtaatggttttgaaaggaatggctaccttttttcatcagtatttaggtgatatgttcgggatcaaatccgtttatcggctgagaaatggtctgtatgaaaaactgcagcggctttctttttcttactatgataacgcgaaaacaggagatttgatgtccaggctgactgctgatgttgaagggcttcgttttttcttatcatacggtctcgctgagctcattcgcttcggcctgctggtagccatcagcctgtcggttatgttttactattctgttcctctcacgcttgtgacaatagctgttctgccatttctcgcggttgcggtataccggtttgacaaaagagtccatcccgccttcagaggcatccgcaaatcgtttgcgaaactcaatacaaaagttcaggaaaatatcagcggcattaatacggttaaatctctttccagggaagattttcagatcagcactttcaataaagccaatgcagaatacagggcgcagtatttacaaacatcatccatctggtctgcgtatttccctttaatggagttcattggtaacatttgtattgtagctcttctctcatacggcggttacttggttatgcaaaatcagctcaatcccggcgagcttgttgctttcttcagccttgtcaattatatgatgtggcccattatgaacttaggttttgtcatcaatatgttctctcaagcaaaagcgtcaggggaacgcctgctcgacattctggaaaaagaagaagacattacaggtcatcctcatgctttgcataaacaaaaattaaccggagatgtccatttcaaaaatgtttctcttgcatacggaaaagaacaaacaaacgcgctgtgcaatgtaagctttgaggcaaacagcgggaaggtaatcggactgttgggcccgacaggttcaggcaaaagctcagtgacacagcttctcaccagattttacagtcctgttagcggaatgattaccattgatcacaaaccaatcacagattattcgttaaaaacccttcgctccaatatcggggtcgtacttcaagaatccttcctgttttcatctacgattagatcaaatatttcgtatgggcggccggatgcctcaatggaagacgtcattgaagcggcaaaaagggcgcaggctcataactttattatggagcttcctgataggtatgacaccatgctgggagagaggggaatggggctttccggcggacagaaacagcgtattgccattgcgagagccatctgcttgaacccgagcattttaatattggatgatgccacaagcgcagtagatatgcaaacggagcacagcatacagcttgccttaaaagaagtcatgaaaaaccgcacaacctttatcgtcgctcaccgcatttcttcactgaaacacgctgatgaaattctcgtttttaataaaggacgcattcgtgaaaggggaacacatcatgagcttcttgaaaaaggcggctactataaaaagatttacgatttgcaataccgtgatgtcaaaatgattaatgagccgcatgaggtcggatagggaggggccaaatgaaacaagcgaaaaaacaggggattttagagcgtttctattactcttcagatgaaatcattgaaaagccgtttaactgggctcaaatgtggcggctgctgagctatgtcaaaccatatcgaaaaacaattttgccgctttcttttctcaccgtattaattggcactgctgtgaagcttgtgatccccattttgatcggcgtttatgttcttgatcaagcgattacaaggagaaactcggagctgctgattcagctcatttttattattagcggtttatatgtcctcaattacgccgccaatgtgttaagaattaggtggatgaatcagcttggccagcatgtcatttacgatttgcgacagcatttatttacccatgtgcagcgcttatcccatcgattttttgatcagcggtcggcgggatcgatcttagtcaggatcatgaatgatattaactctcttcaggagctctttacaagcggagtcatcaatttgttgaccgacttgctgcttctggccggcgtgattattattttgtttacgctgagccctgagctgactatagccatcatggtgacattgccgattatgttttttatttcaacaagtctcagaaaaaaaatacgccgatcctggcaaacggtacggctgaagcaatcgaagctcaactctcatctaaacgaaagcattcagggcatccgggtcacacaggcatttacgcaggaagaagaaaacatggcgtattttgacggtgtcaatcaggagaactacgaatcatggcgggaagcaactagaaaaaatgccatgttccgtccgcttgtagaaatgacgaatgcgattgggacggctgtcttgatttggtatggagccacactcatcatgaatgaaaccattacgattggcgtcttcgtttcttttgctttctatctgggaatgttttgggaacctatttcgagactgggtcaggtctataatcagctgttaatggggatggcatcatcagaacggatttttgagtttctggacgaacagccaaatgtcaaggagaagccgaatgccattcataatgaaaagataaatggggagatcagttttgaagaggttgaattttcgtatgatgaaaaacgaaaagccctttacgccgtttctttctctattccggcgggctcgacgcttgcgcttgtcgggcatacagggagcgggaagacgacgattgccaatttaatcagccgtttttatgatgcgaccggaggcaccattaaaatagacggtataccgattaaggatctttcccttgccagtctgcgctctcaaatcagcattgtcctgcaagatacatttattttctctgggaccatcatggaaaatattcgttttggaaggccaaatgcttcggatgaagaggtgatgaaagcgtcccaagcggtcggagcggatgagtttatttctgatttagcagaaggatacgcaacagaggtggaggaaagaggcagcgtactgtctgccggtcagcgtcagcttatttcctttgcaagagcattgctcgccgatccggctattatcatccttgacgaagcaacggcaagcattgatacagagacagaagtaaaaattcagcaagcgttaaaaacgcttctgaaagggcgtacagcagtgatgatcgctcacagattgtctacgatccgcgacgccgaccgcatcattgttcttgatcacggcaggaaaatagaagaagggaaccatgatcagctgctcgctaaaggaggcatttatgccgggcttgtgaaagcgcaatacagcacagcgatagaataatatgaaaagccttcaatattgaaggcttttggaaatttattagaaaaacatgaaactttttgatatccttcccgtactatttgttagatattctcaaggaggttttgaaatggaaacgaatgtagaaaaaaacagcggaacggcgactgaaaagccttcacttttaggagtaatcacaagtccgtccgttcaatttgaaagaataagagaaaggccggctgtatggggaccgcttttgattgttgcagcaattatcatcgtcggtgccgtgctgcaatcactcggtacggattatagtgagcttttgaaaagccaggatacgcaagggctatctgctgaacaaatggaaactgtcgcaacaataaccaaagttggcggaatggcaggcgctattatcggcggtatcgcagcattatttattgcccctcttatttattggctctgtgtaaaagtatcaggcggtgttacgacatataaaaaaatgctttctctcggtctgtttgtctctttgattagcagtctcggattattggttaatggaatcgttgcttttacgactgacgtgaatcctctttacagcacgacgtcactggcagggattatcccatctgacggggctcttgccagcgtgttaaatacctttgaaattttcagcatctggagctttgtattattagcaatcggacttcacaaaacgggaggcatctcaaaaaaagccgggtggatttcagcaatcattctattcggaattttagttgtattttcgcttttttcaggtttaatcaattctgtggcgggtgcataagctcatgaaaaaagtctggatcggaattggaatcgcagttatagtcgctctttttgttggaatcaatatataccggtctgccgctccgacaagcggcagcgccggcaaggagatacagacggggagcgttgaagaaaatgaaatctcatcaacggttatggttcctggcacgctaaaattttcaaatgaacagtatgtcttttatgaagcggataaagggacattagaagacattaaagtaaaggaaggcgataaagttaaaaagggcacggctttagtcacctatacaaatgagcagctgagcctggaaaaagaacagaaccagttaacgtctgaatccaaccggcttcaaattgaccaaattcaagaaaagttaaaagccttggacagcaaagaaagagaactggaaaaacaggtaggaaagaaagaagcagaaaaacaaatcgaatctgaacggacagagcttcaaatgcagaaaaaaacagcggagatcgaattaaaacaaaccgagcttcagcggcagtcacttgccaaccgggtgtcagatttagaagtgaaaagcgaaattgaaggcaccgttatttctgtcaaccaagaagcggcatccaaaaagtcagatattcaagagcctgtcatacatatcggcaacccaaaagaccttgtcgtctcagggaaattgtctgaatacgatacattgaaagtcaaaaaaggccagaaggtcacactcacttcagatgtaatacagggtaaaacatggaaaggcacggtttccgcagtcgggcttgttccggatcagcaggagagcgctgcggcacaaggaacagaacaggcggtccaatacccgcttcaagtgaaaataaaaggaaatcttccagaaggaaagccaggctttaaatttatcatgaatattgaaacagataaacggaaagcaaatacgcttccttcaaaggcagtcaaaaaagaagatgaccaatattatgtgtatacagtaaaagacggaaaagcaaagcgagttgatgtcaaaatcggcgaagtgacagatgacctgacagaaattaaagaggggcttacccaagatgatcaagtcattttgaatccatctgatcaggtgactgacggaatggaagtgaaatcctaaatgattcagctttctaatgtgcgaaaaagctaccagatcggaaaggaaacgtttgatgttctccattctattgatttggacattcatcaaggtgaatatgtctcgattatggggccgtcaggatcaggaaaatcgacgatcatgaatattatcggctgtcttgatcggccgacttccggtacatatcaattggacggcgaagacatttcttcatataaagataaagaactggcggcagtccgtaaccggtccatcggttttgtatttcagcaatttcagcttcttccgcggctgaacgcaaaaaaaaatgtcgagctgccgatgatttattccgggataggcaaaaaggaacgtcaagagcgggctgagagagcattggaaaaggtcgggttagccgatcgaatgctccacatgcccaacgagctgtcgggcgggcagaagcagcgggtggcgattgcgagggcgatcgtgaatgagccgaaattgattttagctgatgaaccgaccggcgcgctggatacgaaaacaagcgaggcgattatggatcagtttacagcattaaatgccgagggaacgacaatcgttctggttactcacgagcctgaagtagcagattgcacgaatcggatcgtcatggtgcgtgacggaaacattgttcctgccagctccggacaaaggagtgtgggagaatgagcctgttggaaaacatcagaatggctctaagctctgtccttgcccataaaatgcgttcgatcttaacgatgctcggcattatcattggtgtaggctctgtcattgttgtcgttgcggtaggacagggcggcgagcaaatgctgaagcagtcgatcagcggcccgggaaatactgcggagctgtactatatgcctagcgacgaggagcttgcaagcaacccgaatgccgcagctgaatctacgtttacagaaaacgatattaaaggtttaaaaggaatagaaggcattaaacaagtcgttgcttcgacttctgaaagtatgaaagcgcgttatcacgaagaagaaaccgatgctacggttaacggaataaatgatggatacatgaatgtcaattctttgaaaatcgaaagcggcagaacctttaccgacaatgactttctcgcggggaatagagtcggaatcatctctcaaaaaatggctaaagagctgtttgataaaacctcccctctaggtgaagttgtctggattaacggacagcccgttgaaattatcggcgtgctgaaaaaagtaacaggcttgctttctttcgatttaagtgaaatgtatgtgccatttaatatgatgaaatcctcttttggcacaagtgatttcagtaacgtatcattgcaggtcgaatcagcagacgacataaaatcggctggaaaagaagcggcacagctggtaaatgacaatcatggcacagaggattcgtatcaagtgatgaacatggaggagattgcggccggaattggcaaggtaacggcaattatgacgacgattatcggctcaattgcaggtatttcccttttggtcggcggaatcggtgtcatgaatatcatgctcgtatcagtcacagaacggacacgggaaattggaatcagaaaatccctcggtgcgacgaggggacagattctgactcagtttttaattgagtcagtcgtattgacgctgattggcggtctggtcgggattggtattggatacggaggggccgcgcttgtttcagccattgcgggctggccgtcactcatatcctggcaggttgtatgcgggggcgtgctgttcagtatgctcattggtgttattttcggcatgcttcctgcaaataaagctgcaaagcttgatcccattgaagcgctgcgttatgagtagcctcatgcaacatgcatgaggtttttttatgtttagtgatttctactatgaatataaaagacttttttcattaaaataagaagaaaatgtcgtacaattgtccttatttttgtcgaatttacagtttacaaaccctatagacatacgttaatatggagaaacgtgaaagattttgatagttattgaatgaatttgaatgattttagttgcctaaaccgaaaatagcgtttacaatgaaattgtattcaaaatgaatacgttttcattaggaggtgaagcatgctaactcctgaacggcatcaattgattattgatcaaatagaaaagcatgatgtggtaaagattcaagagcttataaatctgactaatgcttctgaatcaacaatcagaagagatttatcgacccttgaagaacgcggttttttaaagcgcgttcatggtggagcggccaagctttctgatatcagacttgaacccgatatgcttgaaaaatcatccaaaaaccttcacgataaattgaagattgctgaaaaagcagcttctcttttagaagaaggggattgcatttaccttgatgcaggcacgacgacattgcacatgattgattttatggataaaaccaaagatattgtcgttgtcacaaacggggtaatgcatatcgatgcattaataaggaaagaaatttctttttatctgcttggaggatacgtaaagcacagaacgggcgcgattattggaggcgcttcattgattgccatggaccagtacagatttgacaagagttttctggggacaaacggtgtccatacagaggctggatttacaacgccggaccctgatgaggcccttttaaaacagaaagcgatcaaacaggcaaaacacgcttacgtcttagcagacccttcgaagttcggagaaatttcattttcggcattcgccggaataggcgacgcaacaatcattacgactgacgctgaagagcttacattcgataattaccaagaaaaaactgtcgtaaaggtagtgaaaccatgatttacactgtaacacttaatccatctgtcgattatatagttcacgttgaagatttttctgtaggaggcctgaaccgttcttcgtatgataccaagtatccagggggcaaaggcatcaacgtatcgagactgctgaaaagacaccatgtggcgtctaaagcgctcggattcgtcggcggatttaccggagaatatatcaaaacatttttacgggaagaaaacctggaaacagctttttctgaagtaaaaggggatacccgtatcaatgtaaagctgaaaacgggtgatgaaactgaaattaacgggcagggaccgacaatttcggatgaagatttcaaagcctttttagaacagttccaatctttgcaagagggagatatcgttgttcttgcaggaagcattccatcttcactccctcacgatacttatgaaaaaatcgcagaggcctgcaaacagcagaacgcacgagttgttctggatatctcaggcgaggctcttttgaaagcaacagaaatgaaaccatttttgatgaagccaaatcatcatgagcttggagaaatgttcggcacggccattacatctgttgaggaagccgttccttatgggaaaaagcttgtagaacaaggcgctgaacatgtaatcgtatcaatggccggagacggagcgcttctgtttacgaacgaagctgtttattttgctaacgtgccaaaggggaaattggtaaactcagtcggagcaggggattccgttgttgcaggtttccttgccggaatttccaaacagctgccgcttgaagaagcattccgcttaggagttacttcaggcagtgctaccgcgttctctgaagaacttggaacagaagaatttgtccagcagcttcttcctgaagttaaggtcacacgtctatagaggaggaaacacaagtgaaaataactgagcttttaacgaagcatacgataaagcttaatattgagagcaaagaaaaagaaaatgttattgacgaaatggtcactgttcttgataaggcaggaaagttaaatgaccgacaagcctataaagaagccattttaaatcgcgaaagccaaagctccacgggtatcggtgaaggaatcgctatcccccatgcgaaaacggcaagcgttatcaacccggcgatcgcgttcggacgttcaaaagacggcgtcgattatgaatcattagacggccagccggctcacttagtgttcatgatcgcggcgactgaaggcgcaaacaacactcaccttgaagcattgtcaagactttcaacgctgttaatgcgtgaagaaatccgtaagcagctccttgaagctgagtctgaagatgccatcatcgacattattaatcagcacgataaagatgatgacgaagaggaagaggaagaagaagcggcaccagcacctgccggaaaagggaaaattttagcggttactgcatgcccgacaggtattgcccatacattcatggctgcggatgcccttaaagaaaaagcgaaagagcttggtgtggaaattaaggtcgaaacaaatgggtcaagcggcattaagcacaagctcactgcccaagaaatcgaagatgcacctgcaatcattgtcgcagcggacaagcaggttgaaatggaacgttttaaaggcaagcgcgtacttcaagttcctgtaacggcgggtatcagacgtccgcaagagcttatcgaaaaagcgatgaatcaagatgcgccgatttatcaaggcagcggcggcggttcagcagcttcaaacgatgatgaagaagcgaaaggcaagtctggaagcggtatcggaaacacgttttataagcacctgatgagcggtgtcagcaacatgcttccgttcgtagtcggcggcggtattctcgttgcgatttcattcttctggggaattcactctgctgatccgaatgatcctagctacaacacgtttgcagcagcattaaactttatcggcggcgacaatgcattaaaactgattgttgcagttctggccggtttcattgcgatgagtattgcagatcgtcctggttttgcgcctggtatggtcggcggatttatggctactcaagcgaatgctggattcttaggcggcttaattgccggattccttgccggttatgttgtgattttactgaaaaaagtatttacgtttatccctcagtcacttgatggattaaaacctgttttgatttacccgctgttcggtatttttatcactggcgtattaatgcaatttgtcgtcaatacacctgtagcggcatttatgaatttcttaacaaactggcttgaaagccttggtactggaaaccttgtgttaatgggtattatcttgggcggcatgatggcgatcgatatgggtggcccgcttaataaagcagcctttacgttcggtatcgccatgatcgatgcaggcaactatgcgcctcatgcagcaatcatggccggcggtatggttcctccgcttggtatcgcacttgcaacaaccattttcagaaacaaattcactcagcgtgaccgtgaagctggtattacatgctatttcatgggagctgctttcgtaacagagggagcgatcccatttgctgcggctgatccgcttcgcgtcataccagctgctgtagtcggtgcagctgttgccggcggattaactgaattcttccgagtaacgcttccggcgcctcatggaggagtattcgtagctttcattacaaaccatccgatgctttaccttttaagtatcgtgatcggtgctgtcgtgatggcaattatcctcggtatcgtcaaaaaacctgttacagaaaaataagaaaaaaagcgtccttggttcgaaaggacgctttttcttatccggccggcagggagcgcggttaagttatgtattttattcttttttatgataaagtaaaagaagagaaacaactgacatagcaattgtctaggaggaaacactttgaccgaggaaaaaaatacgaatactgagaaaacggcgaagaaaaaaaccaatacgtacctggaatggggtaaagcgattgtcatcgctgttctgctggctctcctgatccgtcactttttgtttgaaccgtatttagttgaaggttcatctatgtatcccacattacatgacggagaaaggctgtttgtgaataaaacagtcaactatatcggcgagctgaagcgcggagatatcgttattatcaacggtgaaacttctaaaatccattatgtaaaaagattgatcggaaagcctggagaaaccgttcaaatgaaggatgacacgctttatataaacggtaaaaaagtagccgagccttacttgtctaaaaacaagaaggaagcagaaaaacttggtgtcagtctgacaggagactttggaccggttaaggttccgaaaggcaaatactttgtcatgggagataaccggctgaattctatggacagccgaaacgggctgggactgatcgcggaagatcgaattgtcggcacatcgaagtttgtctttttcccgtttaacgaaatgcgtcaaacaaaataaaaacgccttgctggcctaggacagcaggcgtttttattttgaaaaagaagcgaccaatgcaatgcataaaaccgtgatgaacactgaaccgataatagctagcacactgaagaaaaggtgaacctgtttgttctcttttccgcgcttttctaaaagccgtttagaaaaaatgtgcgaaaatatgtaaataagggctatgcctatatataagccgatatctttggcggtaaagcctgttacggcaaggtaaaagcccgtaaaaaagatcagtaagcaatattcagtaagtgttaaaagcctcaacgtgttcctccatgagagtgtgtaattttccaggcggatgcattctctctctttaattgtaacacagctggctggtttgggtgtataagtgttttctctctgttttatcagggaatcatttctcttgccctgcattcatggtatacttttattgatgatagacatgatggaggataataaatgattgctgtaaataatgtaagcttgcggtttgcggatcgcaagttatttgaagatgttaatattaaatttaccccaggcaactgctatgggttaattggtgcaaacggtgccggtaaatcaacgtttctaaaggtgctgtcaggcgaaatcgagcctcagacaggcgacgtgcatatgagtcctggcgagcgtcttgccgtcttgaagcagaaccattttgagtacgaagagtatgaagtgctgaaagtggtcattatgggccacaaacgcctgtatgaagtcatgcaggagaaagacgctatttacatgaagcctgatttctcagatgaggatgggattcgtgctgctgagctagaaggtgaattcgcggaactgaacggttgggaagcggaaagtgaagctgcgatcctgttaaaaggccttggtatctcagaagatctgcacacaaaaaagatggcagacctcggcggttcggagaaggtaaaagttctcttggcacaggcattattcggcaagccggatgttctgctcctcgatgagccgacgaaccacttggaccttcaggcaatccagtggcttgaagagtttctgattaactttgaaaacacagttattgtcgtatcccatgaccgccacttcttaaataaagtatgtacgcacattgccgaccttgattttaacaaaattcaaatctatgtcggaaactatgatttctggtacgagtcaagccaactggcgttaaagctttctcaagaagcgaacaagaaaaaagaagagcagattaaacagcttcaagagtttgtcgctagattcagcgccaatgcgtctaaatctaagcaggctacatcaagaaagaaacttctcgaaaaaatcacgctggatgatattaaaccgtcttcccgccgctatccttatgttaacttcacgccggaacgggaaatcggaaatgatgttcttcgcgtggaaggcttaacaaaaacaatcgatggcgtaaaggtgcttgacaatgtcagctttattatgaatcgagaagataaaattgctttcactggccgaaacgaacttgctgttactacgctgtttaaaatcatttccggggaaatggaagctgacagcggaacgtttaaatggggtgttaccacatctcaagcgtattttccaaaagacaacagcgaatatttcgaaggcagtgatctggaccttgtagactggcttcgccaatattctccgcacgaccaaagtgagagctttttacgcggtttcttaggacgcatgctgttctctggagaagaagtccacaaaaaagcaaatgtactttctgggggagaaaaggtccgctgtatgctgtcgaaagcgatgctttctggcgccaatattttaattttggatgagccgactaaccatttagacctagagtccattacagcgctcaataacggcttaatcagctttaaaggcgctatgctgtttacttcccatgaccatcagtttgtgcagaccattgccaacagaattatagaaattacacctaacggcatcgtcgataagcaaatgagctatgacgagttccttgaaaatgctgatgtgcagaaaaaattgactgaactatacgccgaataaaaaagcagagatttttctctgctttttttgatacctaaatgtgaaaggagatcacaacatgaaatttttggttgtcggagcaggtggagtaggcgggtatattggcggacggctttcggagaaaggaaatgatgtgacatttctcgtgcgccaaaaacgagctgagcagcttaaagaaaccgggcttgtcatccatagtgaaaaagggaatgtatcatttcaacccaaactaatcagtgccggagaaacagggcaatttgatgtcgttatcattgcttctaaagcatactcgcttggtcaagtgttagaggatgtcaaaccacttatccatcaggaatctgtcattatccctttcttaaacgggtaccgccaatatgagcagctatttgcggcattttcaaaagaacaggtgctgggcggcctgtgttttatagaaagtgctttagacaacaaaggagaaattcatcatacgagcgcatcgcatcgttttgtatttggagaatggaacggcgagcgtacggagcggataagagcgcttgaagaggcattttcaggtgtgaaggctgaagtcatcattagcgggcatatcgagaaggacatttggaaaaagtatctctttattgcagcgcaagcggggatcacaacgttatttcaacgaccgcttggcccaatcctcgccacagaagccggacgtcacacggcccaaactcttattggggaaatttgcgctgttttacgaaaagaaggcgttccggctgatccggatcttgaggaagagagctttcgtacgatgaccaacatgtcttaccatatgaagtcctccatgcttcgggatatggaaaacggccaaacgactgaaggagaccacctgcatggatttttgcttgaaaaagcaaaacgtttatctctcgcagcaccagtattagaaaccgtttatgcgaatctgcaaatgtatgaagcagaaaaataaaaaaaggaggcggaaaagcctccttttatttacttaaaaagcccaatttccgtttctgaagataggctctcttttcccgtctgccgtaattccgtcaatattcatatccttagaaccgatcataaagtccacgtgtgtaatgctttcatttaggccttctttgacaagctcttcacgagacatctgctttccgccttcaatattaaaggcataggcgcttccgatcgccaaatgatttgacgcgttttcatcaaacagcgtgttatagaaaagaatgtttgattgtgatataggcgaatcgtaaggaacaagtgccacttcacctaaatagtgagaaccttcatctgtttccaccagttcttttaaaatatcctcacctttttcagctttaatgtcgactatacggccattttcaaacgtcagggtgaaattttcaataatatttccgccgtagcttaatggttttgtgcttgataccactccgtcaaccccgtctttttgcggcagcgtgaatacttcttctgtcggcatattggccataaactcatggccgctttcattcacgcttcccgcacctgcccaaacatgcttcctaggcagcttaattgttaaatcagttccttcagcttgataatgtaaggcagcgtaatgtctctcgttcaaatggtcaactttttcatgaagattttggtcatgattgatccacgcctgaaccgggttgtcttcatttacgcgtgtcgctttaaaaatttcttcccacagaaggtggatcgcttcctcctctgatttgccaggaaacaccttgtgagcccagcctgctgatgccgcacctacgacagtccagctgactttgtctgattgaatatattgtctgtatgtatgcaatgctttgcctgctgctttttggaatgccgcaatccgtttggaatctataccttttagcaagtctgggtttgacgacacaacagaaatgaaagcagctccatttttggcaagctcttctctgccttttgcttcccattcaggatattcttcaaatgctttaaacggcgcaagttcgtattttaatttggctacttcgtcatcctgccaattcacggtgacgttttttgcgcccttttcatatgcgtgttttacaattaaacggacaaaatcccgaacgtctgttgaagcatttacgactacatactggcctttttggacattaacgccgacttctaccgccagctgtgcatatgtatttaatttctgtgaaaatgaatccatgaatcattcctccaagcttttttctcatcatatcaaatatgatcctataaaggaaagaaggagcccaaagtgaaaaacccaaaacgacacgtcttgggtttttcaatattatggatgattcagttttacagtgccgcctgcaggcgaatggggcatatttgccaaagaaatgctcatgcctccaagaataattccgcttaaaatggctgcgatcgctactcttcttcctaaatctcttagcatctgtttcctccttaacgtttctccatttcccacaatatgaaggaagtgaggaaaaaagaagcaagaaatttgccgcgtgtgagaattttgcgggtaaagactatttaattgccttttgcagcttatcaatcacttctaaagaacggcctgtgccgattgctacagattcaagcgggttttgcgccacgtgtacaggcacgacaatctcttctgtgagccattctttaattccattaaggagcgcaccgccgcctgttaaaataacgccgcgatcaacaatatctccgctcaattcaggcggacagtcctcaagtgtcgctctgatggcttcaagaatatgcaggagggattcacgcattgcatcttgaatttcgttggattgaagcataatggtttttggaagacctgtcacgaggtcacgtccccgaatttccattgcctctggtatatgttcaatcagagcatggccaattttcatttttacctgctcagctgtgcgttcgccgatcagcaaattgtattttttacggacgaaagaaacgatatcctcatcaagctggtctccgccgatcctgatagaatggcaggaaacaacgccaccgaaggaaataatagcgacctctgtcgtccctccgccgatatctactaccacattggcaaccggctcatcaaccggtaaatccgctccgatggcggctgcaactggctcttcgattaaatgaacgtttttcgcgccgcaatttttcaccgcatcactgatggcgcggcgttctactgctgttgagcctgatggtgtgcaaacgactacgttcggttttctgaacgacatgccgatgctttttgcggcttttttcataatgtgctttagcaggtcagttgtcatatcatagtctgcgatcacgccatctttcatcggtctgacagcgacaatttttcccggtgttttaccgatcatgtttttcgcgtcagctccgattgcaagcactgcttttgtcgtcgtatcgactgcgacaacagatggttcatttaggataatccctttatttttgctgtaaacaagtatattagctgttcctaagtcaatcccgatttcagttgattgaaacatgttttcacccaatctctatcctaatttaatatgattctacatttaaagtttctcagaaatactgcgatttttgggggtgtgtgtcggtaaagaaatgtttttgtaaaaaatcaaggaactgtgtaatagaagtaatacatttttcggttttatggaaaaaatatcttgtaattcttatagaaagcgggaaactttttcaaagtttcattcgtctacgatatattgaggtacatccttaaaacattacatgagaaaagaaacatttaaaggaagaagggtttttatgaaatcaataggtgttgtgagaaaagtagatgaattaggccgcattgtcatgccgattgagttgagacgggcattggatattgccataaaagacagcattgagttttttgttgacggagataaaattatcttgaaaaagtacaaacctcatggcgtttgtttaatgactggagaaatcacttcagaaaataaagaatacggcaacggtaaaattacgctaagccctgagggtgcacagctgcttctcgaagaaattcaagccgctttaaaagaataaaattatgctaaaaaaggcggagcgatatcatctccgccttttttgcgtatcaatttttgattaccgccgcctaagataagacatcaagatatttggtaatgaatgatttgggatactttacatattttactcaattatttgtcgaagaatggtacaataagtagagaaacacaagcggcaggtggtcatatgagaaaatatcaagctcgtatcatttccatcattttggcaatgatttttataatgttttgggattatttattttattttataggcaaaaacccgattaattggcctgttgatattgtgtatactgcagtcacgctggtaagtgtctggatgttggcttattatattgatgagaaacagcagctggttaagaaaatgaaggataacgaatggaagtataaacagctttctgaagaaaaaaaccgcatcatggataatttgcaggaaatcgtatttcaaacgaatgcaaaaggtgaaattacatatttaaaccaagcgtgggcatctataaccgggttttcaatcagtgaatgtatgggaacaatgtataacgattacttcataaaagaaaagcacgtagccgaccacattaacacccaaatccaaaacaaagcgtcttctggcatgtttacggcaaaatacgtgacaaaaaacggcacgattttttggggagaagttcattataaactttactatgaccgggatgaccaatttacaggcagcctgggtacaatgtcagatatcactgagcggaaagaggctgaagatgagctcattgagattaatgaacggctggcgagggaatcccagaaactatcaatcacaagtgaacttgccgcaggtattgctcatgaggtcagaaaccctttaacatctgtcagcggtttcctccagattatgaaaacacaatatccggacagaaaagactattttgacatcatcttttcagagattaaaagaatcgatttagtgctcagcgagctgctgctgcttgcaaaaccgcaggcaatcacatttaaaacacaccagcttaatgagatcttgaaacaagtcacgacattgcttgataccaatgcaattctgtccaatatcgtcatagagaaaaatttcaaagagacagatggctgtatgattaatggagacgaaaatcagctgaagcaggtctttatcaacatcattaaaaacggaattgaggcaatgccaaagggcggtgtcgtcaccatttcaactgctaaaacctcctctcatgcagtgataagcgtaaaggatgaaggaaacggcatgccgcaggaaaagctgaagcagattggcaaacctttttattcaacaaaagaaaagggcactggactgggacttcccatttgtttgagaatcctgaaggaacatgacggggaattgaaaatcgaaagtgaagctggaaaaggcagcgtctttcaagtggttttgcctttaaaatcagacagctgagaggagaaaaataaagtgaactcgcttctgtttgtatatgggacattaagaaagcatgaaaaaaaccatcatttgctggcacaatcggcatgtatcaatgagcaggcgagaacaaagggaagtttgtttgctgcaaaagaggggcccacagttgttttcaatgatgaagatgaaggctatatatatggcgaagtatatgaagcagatgaattgtgtatacataagctcgatcaattttttcaaggatatcataaacaaacggtgtttgtagaaacggatgtcgggattaaaattgcgcttatttattttatgaacaaagacgggtgtgccggttttacgaaaataagcagcggcgactggaaagaacatcagatgatcagcaaatcgaaaaatcccatttattattttgcctatggatcatgcatggataatgcccgctttcaaaaagcgggagtcgatcactattttcaagatccagtaggaagagctgttttaaaaggatacacaacccgcttcacgctaaaaagggaagacggttcaagagcggacatgttggaagacggaggaacaacagaaggcgttttataccgtatcccttattctgctctctcctatctatataaaagggagggcgtcgaatctcttacgtatcggccggcatttgtagacgttgaagctggcggaaggcactacaaagactgtttaacctttctcgtcctccaaaaagaagcggaaattgccccgcctcagcactatcagattgaaatcgaacgcggagcggagctgtatttgtcgcctgagtttactgaaaagctcaagcggcatatgaattcgctgccaaaaggataacactgtaacaaaagaatatgataaaatttgatcaatatcatgtcatataaaggagcactacgatgaaaaaagaatttgcggtaattgggctgggccgttttggtggcagtatttgcaaagcattaagcgaagaaggcgtcgaggttatggcaatggatatcgatgaagataaagtcaacgagtatgccaagattgcatctcacgcagttatcggtgattcgacagacgaatctgtcctgaaaaatttaggcctgcgaaattttgaccacgttattgtagcaatcggggaaaatattcaagcgagtattttaacgacactcattctgaaagaacttggcgtccatacgattacagttaaagcgcagaacgattatcacgaaaaagtgctgtctaaaattggtgcggatcacatcgtccacccggaacgcgatatggcaaaacgaattgcgcataatatcgtgtccaacaatgtacttgactatttggagctgtctgaagagcatagtcttgttgaaatcgtagctaacagccgcctggctggaaatacacttctcgatttagatattcgcgcaaaatacggtattaatatcgtagccataaaaaggggcaaggaagttatcgtatcaccgcttgcaaccgaagtcatccaccaagaagatatactcattgttattggatcagttacagacatctcccgtttcgaaaaaagagttcttcatacaaaatagcagccaaataagccgtcctcaaagggcggtttttcatattatcagaatataacaactttaatgaactgagcgtcaatttcttaaaatttcattgactaagcacaggcgttccgatagcatattgtaccatataataaaaaagaggaggggcctatttgaataaagaagcgctagtcaataggctgaatgcttcagccaaaagacaaaaagctgatatcgtcattaggaacggaaaaatcatggacgtttataatcaagaatggatatatgaagatattgcgattacagatggagttattgtaggcctcggtgagtatgaaggtgaaaataccattgatgcagagggacaaatgattgttccgggttttattgatggacatgtacatattgagtcgtcaatggttacaccgattgagttcgctaaagcagtgttgcctcatggtgtgacgacggttgttacagatccgcatgagatcgcgaatgtgtctggtgaaaaagggattgtgtttatgcttgaacaagctcggcatacaccgctgaatatccattttatgcttccttccagtgtgcctgccgcaagttttgagcgatcaggcgcaattctcaaagctgccgatctcaagcctttttatgaagaagaagaagtattagggctggctgaagttatggattatgtgtcggttcagcaggctgaagaagacatggttcagaaactgctcgatgcccgtgtggcaggaaaacggatagacggtcatttagctggtttatcaacagacctcattaacatttacagaaccgcctttgtcttaaacgaccatgaagtaacatcgaaggaagaagcccttgatcgtatcagaagaggcatgtatgtcatgatgcgtgaaggatcagtcgccaaaaacacgctcaatgtgctgccggcggtgaatgaaaagaacgcacgccggttctttttctgtacggatgataagcatgtggatgatttattgtcagagggaagtgtaaaccatcaggtgaaaatggcgattcaagctggacttgatccgtttttagcctatcaattaggaagcctcaatgcggccgaatgctacggattagatacaaagggagcgattgccccgggttttgacgctgatttgctctttgtatctgatctggaaaatgtcactgtcacaatgacgatggtaaaagggcagactgttgctgaagacagcaaagcggtttatcaggatcatgcttcaactgcagcaccagatcaggcactgcttgattctgttaagcttgctgctcctcttaacaaacaggattttcatatgccaatcgattcagaggagcagatcaatgtcattcaaatcataccaaatcagcttgaaacacgattagtacaagttccggctcctgatgcccgcgaatttgagcctgacactgagtttgatttgttaaagattgcagttgtcgagcggcataaaggattaaaagaaaccggacttggtattgtgaaaggttttggattcaagagcggagcgattgccacaaccatttcacacgactcccataatattattgctgtcggaacgaatgatgaggatatcgcggcggcagttaataagctgcaggaaattggcggaggattaacgattataaaaaatggggaagagctccattcagtaccgctgccgattgcagggttattatccgaccaatctgcagagcaagtgaatcaaagcttgctgacgcttcatgataaattgccgttaatcggtttcacaggcggatttaatccatttttgacattgtcgtttttagcgttgcctgtcattcctgatattaaaatgacgactacgggattattcgatgtaaaatcatttcaacacatatcactgcaataaaaagaggcactccctaagggagtgcctctttttttaaacctccataatgatcggcaggatcattggacggcgctttgttttttcgtacaagaaaggtgcaagcgtgtctgtaatctcatttttgatttcagaccattgagtcgtttttcgttccattactttttgtaagtgatttgaaatgagctcttgagcgtcgttgatcaagtcgccagattctctcatgtacacaaatcctctggaaatcaaatctggacccgctgaaatcttgaagtcgtccatgtcaatgctgacaacaacgatgacaagtccttcttcagagagaattctgcgatcacgaagtacgatattgccaatatcaccgataccgcttccgtcaatgtacactgaaccggacgggatttttcctgcaactgaagcctcatcgcctttaagcgctaatacttcaccattatccatgataaagcagttttcctctgggatgccacaatctgttgcaagcttgacatgcatcttttgcattctgtactcaccgtgaatcggcatgaagaatttaggcttgattaaacgaagcatcagcttctgttcttcctgtccgccgtgaccggatgtatggatatcgttaagagggccgtgaataacctcagcacccgcacgatacagctggttgattgttcgactcacgctgattgtgttgcctgggataggggatgaagaaaatacgaccgtatccccaggattgattgaaatttggcggtgtgtgccgtttgcaattcttgataacgccgccattggttccccttggcttcctgtacataaaattgttactttattagcaggcatacgattgatttcgttatgctcaataaacgtatttttaggacagttaatataaccgagtgtctgtccaatttcgatagccgattccatactgcgtccaaatacggcaacttttcttccattttgtacagcagcttcaattacctgctgcaagcggtgaatattcgacgcaaatgtagcgaagataattcggccgtccaccttgcggaaaatgtcatgaatgctttctcctacacgacgctcagacatggtaaactccggattttcactgtttgtgctgtctgaaagaaggcacaaaacgccttctttaccgatttcggccattttcgttaagtttgccggctcgccgactggagtaaagtcgaatttgaaatccccagtatgtacaatgtttccgggcggcgtttttacaacaatgccgtaggaatccggaatactgtgtgttgttctgaagaatgacacagccgttttgcggaactttacaatatcatcctcgccgataatgttcagtttcgtctgtctcaataatccatgctcttcaagtttattccgaagtaagccgatcgcgagttttccgccgtatacaggaatattcacttgtctgagcaggtatggaataccgccgatgtggtcttcgtgcccgtgggtgataaaaagccctttaattttatcttcgtttttgactaaatacgtataatcagggatgacgtagtcaattccgagcagttcgtcctcgggaaacttgatccccgcatcaatcagtacaatttcatcctggaattgcaccgcgtacgtatttttaccgatttcgcccaaacctccgagggcgaaaacagcagtctgatcattttttacaaatttcataccgctcataactccaatactttaaaattttcgctctgttgttcatattctaagaatgcaccatcaacaggtgtaataaactcaatattaaatttcttttctttcagctttgttctgacgtcacgctcagatacgccttcaatataaagtgaatctgtcttttcccgaacaggtacttcgtcagccttctcttgataaaataccttataaatcattccaaatctctccttaaatgccgtatgttagactcgctcattctattatattcgaaaacggaatataaggaaagccttgagcaaaataaggatctctcaaatagtgaaagatcccttgtcaggcaattgctttcttacggagcattccgttccattgtcttctgagtttctttcttaatttacgcagcattagccagtccctcctttaatgaaaaatttgtcccagagttcttttatacaaatagtatacggagattgaggaagacttttcgtggttattaatggaatttaatatgatttttgaacgaaattgtttgctgaatgacaatctttttgtatgatgagggtgggaattgcagaccaagacgataaaggggaagttgcgatggattctaaattaatcttttttgatattgacggcacaatatatgatcatgataagaatataccggaaagtacgagaaaaaccgtggcggagcttcagcgccaagggcatcatgtgtttattgccagcggccggtctccatttttggttaagccgattttggaggagctgggcatccactcatttatttcctacaatggacagtttgttgtctttgaaaatcaagtgatttataaaaatccgctgcctgaaaatgcaatcaggcgattattaaagcaggcggatgaaggcaagcatcctgttgtgtttatggctgaggacacgatgaaagcgactgttgcggatcacccccatgttctcgagggaatcggcagccttaaaacagattatccagagaccgatgaccttttttatgaaggaaaagaaatttttcagcttcttttattttgtcaggatgaagaagaaaaagcttatgccgcttttcctgagtttgatctagttcgctggcatgagctatcgactgatgttctgccgcacggaggttcgaaggcagaaggaatcaaaaaagtgattgagcgtcttccgtttgatatcggcgatacatatgctttcggcgacggattaaatgatttgcaaatgattgaatacgttgggacaggcgttgctatgggaaatgctgttcccgaactgaaagaaatcgcggactttgtaacaaaaccggtggacgaggatggaattgcatacgctgtcaaagaattgggccttttaaaataaagaaacggctggcattgtgccagccgttttctcttttagcgctcaattgcgattgcattttcaggttctttgaaaggattttccttatcaatatgatcatagaacataacgccgttcaaatgatcgatctcatgctgaaacacaatagccggaaatccttttaaacgaatatcaatattttcgccttctagtgttgttccttttactctgatgcgagcatagcggggaacataaccgggaatcgcttcatccacagagaggcagccctcgccgcttgttaagtagcttttttcaactgaatggctgacgatcttaggattaaacagagcatagctgtataatttaccggaagcatcttccgcatgaacggcgatcattcgttttttgatattaatttgaggagctgcgagtcctacgccagggcgcagcttgtatttttcggctaattctggattttggctgtttttaacaaattcgatcatgtcggccagctgctgtttttctgcatcagttggaggcagctcaacaggttcggcagtctctctgagggctggatggccgtcacgtacgatgttttccatagtaatcaagaaacttcactcctaaagcttaatatgtaaattatatcggatttcttcacaaaggtgcaacgaaacgaatgaccagccgtatatggctggtcaatttcatgctgtgtggttagcaacagcctccacctaaataagcagctccgacaatgattaacagaatgaataaaacaacgattagcgcaaaggtgcggccgtagccatatccgcagccaccatatccgtaaccaccataactgcagcagcctccgccgtaaccatatccatacatattacataacctcctcttttaattacgccagagcctttataagtaggcatagcgtctaatataacctatgtaaaaacaaaaaagttgtatggtcatctgtcctgatttttcacttttttgatttaatttcagtattgcatttatacagcacggctattgccaaatgtccccatggattctatagtagaaattgtcaagattgggggatttaacgtgaaagacgctataaaacggcggcctggaatgaagatcggagctttttgtgccatggcactgatattaacaggatgcatgggacaggacccggttgattcagttcatcattcattagaaaaagccgcggaatcggaaaagccgtttcaagaagaacaaaacacactcaaagaattagaggccaaagaaaatcagctttacgatagtgttatgaagctcaatatggatgattataaaaaaattgttgctttatctaataaggcgcttgaaaatgtcagcaaacgcgaagaacacctagagcttgaaaatgacagcatgaaaaaatcggaaacagaatttgaggaagcaaaaacgtcagcggaacatattaaggaaaaagacataaaagaaaaggccgatgccgcagcaaaccatatggagaaaagatatacatcatatggcactatgtataaagagtataaaaaagcgcttgagcttaataaaaaactgtatatgcagctgaaagacaaagatttgacaagagatgatctggatcagcagatcgataaagtcaatgcttcttatgaaaagatccttaaatatagcggagaatttaatgaacaaaccgaaaaatataataaagcccgggaagatttatatgatgctgcaggctatcgtgtgaaaaagagctgactcgatcagctctttttttgaatgaaatgcgattcggatttcgttcaaaattttcatttctattgtagtacagcatagtaaggtatactagtacagttttgggtgcggttggcatctgtttttttgatgaaaatgtaaagcgaatacatttattgaaaatcagcgatgaaaacgattgacggttcttctttatttggtgtaaactaatccatgttaagcggtgttgtattagttttttacaacttcgaaataatacagttcaaagcagagtgtaactatcctacataaaaggttttggcaaactggggatcggctaaaatataatacgacttactgctgatactttagggtaccctaagtttgtatgtataaaaggaatgcacgtctaatgactgtttaaaagaaaggaagaggtgacttagtatggctgcaaaaacgaaaaaagctatcgttgacagtaagaagcaatttgatgccattaaaaagcagttcgaaacgttccaaattttaaatgaaaagggagaagtcgtgaatgaagcggcgatgcctgatttaactgatgatcaattaaaagagctaatgcgccgcatggtatttacgcgtgtgcttgaccaacgctctatctcattaaaccgtcaaggacgtctcggattttacgctcctactgcgggtcaagaagcttctcagattgcaacgcatttcgcgcttgaaaaagaagactttgttcttcctggataccgtgatgtgcctcagttaatttggcacggccttccattatatcaagcgtttcttttctctcgcggacatttcagaggaaaccaaatgcctgatgatgtgaatgccctttctccacaaatcattatcggtgctcaatacattcaaacggccggtgttgcgctaggtcttaaaaaacgcggtaagaaagctgtcgcaatcacttacactggtgacggcggagcttctcaaggggacttctacgaaggaattaactttgccggagcttataaagcacctgcaatcttcgtggtacaaaacaaccgttacgcgatttcaactcctgttgaaaaacaatctgcagctgaaacaattgcacaaaaagctgtagctgccggtattgtcggcgtacaagtagacggaatggatccgcttgctgtatacgcagcaactgctgaagcacgcgagcgcgcaatcaacggcgaaggtccaacactaattgaaacacttacattccgttatggcccgcacacaatggctggtgacgatcctactaaatatcgtacaaaagaaatcgaaaatgagtgggaacaaaaagatccgcttgtacgcttccgtgcgttccttgaaaacaaaggcttatggtctgaagaagaagaagcaaaagtaattgaggatgcgaaagaagaaattaagcaagcgatcaaaaaagctgatgctgaaccgaagcaaaaagtaactgatttaatgaaaatcatgtacgaaaaaatgcctcacaaccttgaggagcaatttgaaatttatacacagaaggagtcgaagtaagccatggcgcaaatgacaatgattcaagcaatcacggatgcgttacgcacagaactgaaaaatgacgaaaatgtcttagttttcggagaagacgttggtgtaaacggcggcgtattccgtgcgacagaaggattgcaaaaagaattcggtgaagaccgtgtgtttgacacgccacttgctgaatctggtatcggcggtcttgcccttggtttaggcttaaacggcttccgtccggtaatggaaatccaattcttcggatttgtttatgaagtaatggattcagtttctggccaaatggctcgtatgcgctaccgttctggcggacgctggacttcacctgtaacaattcgttctccattcggcggcggtgttcatactcctgaacttcacgctgacagcttggaaggtcttgttgcacaacagcctggtatcaaagttgtgattccatcaactccttacgatgccaaaggacttttaatttctgcgatcagagacaatgatcctgttgtcttcttagagcatatgaagctttaccgttctttccgtcaggaagttcctgaagaagaatacacaattgagcttggaaaagctgacgtgaaacgtgaaggtactgatctttcaatcattacttacggcgcaatggttcatgaatcgttaaaagctgctgaggagcttgaaaaagacggcatttctgctgaagttgtcgaccttcgtacagtaagcccacttgatatcgatacaattatcgcttctgtagaaaaaacaggacgcgcgattgtcgttcaagaggcacaaaaacaagccggtattgctgcaaacgtagtagcagaaattaatgaccgtgcgatcctgagcttggaagcacctgtacttcgcgttgcagcgccagatacagtatttcctttctctcaagcggagagcgtatggcttccaaaccataaagacgttcttgaaacagcaagaaaagtgcttgaattttaatcaaactgcataatcgagagggaagatgaacgttttccctctattatatatctgttttcaatgcttacgatgtaaactttaaaattgcttaatcaaactaggaggtcgagaactgtggcatttgaatttaaacttccagatatcggggaaggtatccacgaaggcgaaatcgtaaaatggtttgtcaagcctaacgacgaggtagacgaagatgatgtactggctgaagtccaaaatgataaagcagtagtagaaattccttcacctgttaaaggaaaagtattagaattaaaagttgaagagggaacggttgcaactgttggacaaacgattattacgtttgatgcacctggttacgaagatcttcaatttaaaggcagcgacgagtctgacgatgcgaaaactgaagcacaagttcagtcaactgcagaagctggacaagacgttgcgaaagaagagcaagctcaagagcctgcaaaagctactggcgcaggacagcaggatcaagctgaagttgacccgaacaaacgcgtgatcgctatgccttccgtacgtaaatatgctcgtgaaaaaggcgtagacatccgtaaggttactggttcaggcaacaacggacgtgttgtaaaagaagatatcgacagctttgtaaacggaggagcgcaagaagctgcaccgcaagaaacagctgcaccacaagaaacagctgctaaaccggctgctgcaccagctccagagggcgaattcccagaaacacgcgaaaaaatgagcggtatccgtaaagcaattgcaaaagcgatggttaactctaaacacactgctcctcacgtaacgttaatggacgaagtggacgtaacaaaccttgttgcacatcgtaaacagttcaaacaggttgctgctgatcaaggaatcaagctgacttacttgccttacgttgtaaaagctcttacatctgcactgaaaaaattccctgttttaaacacgtccattgacgataaaacagatgaagtcatccaaaaacattacttcaacatcggtatcgctgctgacactgaaaaaggcttgcttgtaccggttgtgaaaaatgcagatcgtaaatctgtctttgaaatttctgatgagatcaatggccttgcaacaaaagctcgtgaaggcaagcttgctccagctgaaatgaaaggcgcatcttgcacaattacaaacatcggttctgccggcggacaatggttcactccggttatcaaccatccagaagttgcgattcttggtatcggacgcattgcagaaaaagcgattgttcgtgatggcgaaatcgtagcagctccagtcttagctctctctctcagcttcgaccaccgtatgatcgacggagcaactgcgcaaaatgcattaaatcacatcaagcgtttactgaacgatccacaattaattttaatggaggcgtaatgttatggtagtaggagatttccctattgaaacagatactcttgtaattggtgcgggacctggcggctatgtagctgccatccgcgctgcacagcttggacaaaaagtaacagtcgttgaaaaagcaactcttggaggcgtttgtctgaacgttggatgtatcccttcaaaagcgctgatcaatgcaggtcaccgttatgagaatgcaaaacattctgatgacatgggaatcactgctgagaatgtaacagttgatttcacaaaagttcaagaatggaaagcttctgttgtcaacaagcttactggcggtgtagcaggtcttcttaaaggcaacaaagtagatgttgtaaaaggtgaagcttactttgtagacagcaattcagttcgtgttatggatgagaactctgctcaaacatacacgttcaaaaacgcaatcattgctactggatctcgtcctatcgaattgccaaacttcaaatatagtgagcgtgtcctgaattcaactggcgctttggctcttaaagaaattcctaaaaagctcgttgttatcggcggcggatacatcggaactgaacttggaactgcgtatgctaacttcggtactgaacttgttattcttgaaggcggagatgaaattcttcctggcttcgaaaaacaaatgagttctctcgttacacgcagactgaagaaaaaaggcaacgttgaaatccatacaaacgcgatggctaaaggcgttgaagaaagaccagacggcgtaacagttactttcgaagtaaaaggcgaagaaaaaacggttgatgctgattacgtattgattacagtaggacgccgtccaaacactgatgagcttggtcttgagcaagtcggtatcgaaatgacggaccgcggtatcgtgaaaactgacaaacagtgccgcacaaacgtacctaacatttatgcaatcggtgatatcattgaaggaccgccgcttgctcataaagcatcttacgaaggtaaaatcgcagcagaagctatcgcaggagagcctgcagaaatcgattaccttggtattcctgcggttgttttctctgagcctgaacttgcatcagttggttacactgaagcacaggcgaaagaagaaggtcttgacattgttgctgctaaattcccatttgccgcaaacggccgcgcgctttctcttaacgaaacagacggcttcatgaagctgatcactcgtaaagaggacggtcttgtgatcggtgcacaaatcgccggagcaagtgcttctgatatgatttctgaattaagcttagcgattgaaggcggcatgactgctgaagatatcgcgatgacaattcacgctcacccaacattgggtgaaatcacaatggaagctgctgaagtggcaatcggaagtccgattcacatcgtaaaataattttcatatcaaaaacagccctcgctcaaagcggggctgtttttttattttgacagcacatgctgtaatggtttaatgatgtcttctttctttttcacacatccctcgattttcaccacgacatggcgctgatcaacaaccataagggtagggacagtttcaatctcatcttcccagccttcttttttatcatagaccttcattttatctatttgctcgggataatctttttctaaatcaagcagtgcatcgtaataaggcgcttcctggtctatttggttctcatcagaaaaaaacaggatttgtgtatgatgaatgttgtcaatccggctttttttcatcggattgatggtggaaagcgtacagcccgataaagcaaatactattatcagcatggggaataccgcgcgatatcgcatctatcttctcctctgtataaacagtagttaactagctttagtttatcacgagaggcggcttaatctgcttcttgttacctaattgttatataattgaaaccgtttttaaagtgagattacatattatatcaatcgtttaaaatagcaacctggggtatattgaattttttgctgcattcttggatgaaagttcaagaaaacgtgaaattacattatgtgctgtggcatatatatcgagtaaagcttctgtatgaagaagatattgtatgagggaaaatggaaaagcacggtctatatgatgatctaaaattaaatgtgttatacagtttattgttgacattttaaatgtgacatattaatataataacaacaaaagaaattaagcgttttcaaatttcaaagaaatggggaataagagatgggtacgattgtttgccaagattgcaacgaagccattcattactttgaagatgagaaagtgacaacattatacggaacatgctgcggacaatgtcaatgtcctgttgatgaagagtaaaaaaaagcatgcggctttaagccgcatgctttttattttttattgaattgctttttgttctttgatgacccggatcatatgtaaagtcgagtcctcaggtccttgaacagggaggcctgcgtcaaggtttttaaaaatgtagctgatgttttcttctgtaataatttctcctggaatgaagattggaataccaggcggatataccatgacaaattcagcaataatccgtccggatgcttcttttaatgggatgacttccgtatttgcataaaaagcatcacgcggagtcattgccaataaaggtatttctggaagcagaacctcagtttgctgatgtgttacatcttgttctgacatttgctgtgcgatctcagttaaagcctctacaagccggtctgcatcattttggctgtcaccaggagtgaaaatacacaaaatattgtacagatcagaaagctcaacctcaatattaaaggattcacgaagccatttttccacgtcatgtcctgtcaggccaagacttttcacagagataatcaattttgtcggatcatagctgtaagctgctttcgaaccaagaatctcagaaccgacacaataaatgccttcaatctggttgaggcgatctctcgtctgattggcaagcttgagtgtttcctcagcaagctggtggccttctgttgcaaggcgttttctggcaacatccaaagaagcgagaagcaagtaagaagttgacgtagttgtcagcatgctcaggatggattgcactctgtcttttgatacaaggccctctctcatgtttaaaatcgaactttgcgtcagtgatccgcccagcttgtgtacacttgtcgctgctatgtccgctcctgcctgcatagccgatagcggcaattcgtcgtgaaaatgaatgtgaacgccgtgtgcttcatccacaagcactggcacatcaaacgaatgagcgagttctacgatgctttttaagtcggctgcaacaccgaaatatgtcgggttgatgacgagaagcccttttgcatccgggtgctcggtaagcgcccgtttagcagattcaagtgtaattccgtgggagatgcccaattcattgtcaatttcaggatgaataaaaattggaaccgctccggaaaatacaatagctgtcataattgatttatgaacatttcttggaataataattttatcaccaggtccgcaaacagccattaccattgtcataatggcgccgcttgttccttgaacagaaaaaaatgtatgatccgctccaaatgcttcagcagccaggtcttgtgcttgtttaataatgccttttggcgcgtgcagatcgtctaatggttcaatattaatcaaatctatgcttaacgcgttttcaccgataaattgtctgaattctgggtccattcctgccccttttttatggccgggaatatggaattgaacaggctgtctgcttgcatgctttttcagtcctgtgtataagggtgtttcatgttgcgacaattgttttcccacctttgtaatcatacctatgcataatagtgtgtattaaaatcagtttctcaaccgttttttagacgtaaaacaaatgaattatattatgaacttgaaagaatgtaaagaacaatttatgatcaaatgaagatgctttctcttaagggaagtaaatctacaaggagtgaagaaaatggagtatcaatatccgatgaatgaagattggacaaccgaagaagcagtggatgtgattgcatttttccagcaggttgagcttgcatatgaaaaaggggcggatcgtgaagaactgcttaaagcttaccgccgtttcaaggaaattgtaccggggaaggccgaggaaaaaaagctatgcggcgagtttgaggaacaaagtacatattctccttatcgcacggtcaaacaggcgagagaatctgatcaggcgaagattaagatgtaggaaaaagagctgggggatatcccggctcttttttatgcttgtgatactttttgggtgagacggtacagaaaagcaagctgcttaaaggcatcgtcgatacgctgaaggaattcctggttattcatattcagcacttcttctttttggagctggatgccgcataacagctcggctttctttacagtctgcaaacgctcaaacagtgtcttcagctgttccttgtccatttcagactgtttatgtactcccggttttgtgtgatctgcagaccaaacgaagctgtcagggatatttttcgtaatggtttcttggttcatttcaagcaatttgccgtattcttctttgataggggattcataaataatcgcaaaccacacaaagacgtggctttcccataaaccaatttggaaatgcggcagttttttatagcctcttttgctgtttgcgaacgccacccagctgtcagccgggggattgacggatcttcttgcgtgctttgccacatgcgcaaacatttcatctccggttaaagctgataaagttggggcaaaatgttcgcctagagctgtaagcttcggacggaccgtctcttttaatacttccatgcgcgcgtctaagccttctattgtaaaagtgttaaagtcctcttcagtgaaacgcatttgtgtcatgattttcctccttcatgctaagtatacatattttatcacagttcatacgagcttcaaaaagattgagtgcgtttgaagtaaggggaaatgtggtaataaacgaataggtaaacacacaattttcagaatcatgttgcgcgtaaatagaacaatcatacgatataagaagtaatcattgttgaatggcaaaatgggatgcttttttacaaacaaatgatctctggaaggggcgaaagacaatgaggcaagttgtaaaagagggatttaaggaagagaaaaacaatcgtgttgctgtctggagactagaggttgattatgaattggcaaccctatatgaagcaatgcagaaagaaaatgaagagcagattgaacaaagcaaaaacaaacttgagcgacttagaaaagaatggattcgtcttaacgggtaaaaaagcgatagtgaaaacgaaccgcatgaatggttcgtttttacgtgagaagggatatttttcattttccttgctttttcattgccgttatcagtatcctataaaataaaaggtctacatagaagagaggtacgaacgaatgacaaattggacggaaattgatgagattgcaaagaagtggataagagaagcaggcgcgagaattacacaatccatgcatgaaagcctaacaattgaaacgaaatcaaatccgaatgatttagtcaccaatattgacaaagaaaccgaaaagtttttcattaatcgaattcaagaaacttttccgggacatcggatactcggtgaagaggggcaaggagacaaaatccactcacttgagggagtcgtatggattattgatccgattgatgggacgatgaattttgtgcaccagcaaagaaattttgcgatttccattgggatttttgaaaacggtgaagggaaaatcggtttaatttatgatgtggtgcacgatgagttgtatcacgcatttagcggcagaggagcttatatgaatgaaacgaagctggctccattaaaagaaaccgtcattgaagaagcgatacttgccattaatgcaacatgggtaacggaaaacagaagaattgatcaaagtgtgttagcgccactcgtgaaaagagtcagaggcacacgctcctacggttctgccgctttagagctggcaaatgtcgcggcaggaagaatagatgcttacatcacgatgcggcttgcgccatgggactacgcagccggctgtgtgctgctaaatgaagtaggaggcacctatacgaccattgaaggagagccgtttacctttttagaaaaccacagtgtgctagccggaaacccatctatacataaaacgatatttgaagagtatcttcatgctcggaagtaggccatttgagcaggatgatctcagcttgttagaaaagctcgcagaggctcaacctgtatggaaagaggaggagtttggagataaagatgcagaagactatatcatttcctactccatgtacaacggttcatggcttgtatgggaaaaagacggtatgcctgttgccgtcagctaccatctcgagtggtctccttcaaacggtaagccgtggctcggaacggtcctgattgacccggctgaagaaaaaaagggacatgcgaagatgatcattgaacagatcagcaaattgcttagagccaaacacaaagcgatgtttgcgggagttcccattgagcgcagtgaatggatactgtttttaagccaatgcggctttgaacagctgaaaacggaaaaagatgagaaaggcaaatcatttatgatcttggtgaagcctttagcagaagctgccgtatgataacgacagcttatttgctgcatgcgggttcaataaaaagcctctcaaacattgagaggcttctgatgatttgaaaattatttttttactgcatgaatataatgaatcgtttcaaacgctgacaaattgtcttttcgattactaaagaaaaggtcattgatgtcgtctggtgatagatgttcatagatcagtaaaccagatgactctaacagatgttcaatctcttgataagtgaaacatgatttcatcggttccccgcttgcggcagccatcttcaccatatgttcaactcgatttgacgtcccttttgctgtaaaaagtgtttcgtccgcataatcaaaaacaatagagcttccaggcgggacataagaaaataaattgctgatcaagcttgcattttcttcccgtgttacataataagacactccgagaaggctgaagaatgtttttgtgttcttaaatccttcatctaagagaggatcatacgaaaacgttttggtgaaatccataggaacaaaatgaagatgacccggaattgtcagatttgcatccttcagcttattttttttgaattgctgtgtagccggatggtcaacctcgaaaacctgtaagctgttttctaattctggatgccgaaagcagaaggtatccagccccgctccaagaatgacatactgttttgcccccaggattaattcgttgtgcaagactttttcacaataagaagcacgtgctagtggcgtgggagacagctggatttgtgcaacccattttaatattttttcaggatcattttgaagacgttcggcgatctctttgttgaaaaacgatattccttgaatcatatttttactgatgtcgataaactctttttcgttaatgagatcttttgcgataaaatcatcaaaaataagagatgtgtcatatttgctgtgataagcacgggcaaacgctgaaatcaaagacgttaagctggactcatttttcctcatgaaatgatcctccacaaaaaataagattctcctggccaggagaatcttattatacatacaaatatattaatagtaaattttagcataaataaatttttttgtcaatgtttttgctcttaactggacgcgcgatccttcacatagccacgtgacctgtagcagaattcgtctatcaattatgtggactgaatcattagcttttataaaatgcgtacttgcggctgcatccctctttttgcaaatcaggagcggttttctgtctcatggcagcatcttttcgtcgtttcagctgagagagaaatcaagatatgtaacaataaaagcctgagggatctcaggcttttcctaatattacaatccaacagcattccaggctgcttcaactttagcggcatcagttgagccgtagaggtcacgggcagactgaatgagagctgccttggcatctttgaacgtggaagaaggcgtgaggtacgttgttaacgcacggtaatagatttgctgtgatttagatacaccaagttttgtgatggtgttgtaagcggctttgtttggaattccgctgtttgtgtgtacaccgccataatcgccttcatctgtgtttggaaggtttcggtaattggcgtaattgtcaggctggttgtattttgtagggttggacaggctgcgaagagcaggctggctgaccgtaatgtcttcaccgatgtcccagtcttctgtatcgttaaaatacccgaatacgtcagagaaagactcgtttaatgcacctggctgattttcataaatcaagttggctgtttcttgggtgacgccatgtgtcatttcatgcgctgtcacatctaatgagccggaaagcggagagaagaatgaaccgtcgccatcaccgtaaatcatctggtctcctgtccatgcagcgttattgtattgagtgccatagtgaacggaagaaacgattttactgcctttgttatcatagctgtttcgtttaaagtttgaataaaaataatcgtacactttaccgaggttatagtgtgcgtcaacggctgcccgctgtgatgaagatgtaaatgttttcgttgtgcttgagacaagcgttcccggaaggcggctttgtctgttttgcaaatcatatgtgatgatttgggtgcctgttggttttgaaagatctcttagaacatattttccgccttcataagagatgttcaaaggaacagttgcgccctttagagttgttccgcttccagtggcggcggcatgttctactttattttgctgttttaaaatgctgcctgtttcggcgtcaactaagacttcccagtttgcaggttcaggctcgacatagcgaatcgtcacgtcgtaagcaagacgatagctgccgtcttttgtttctatggctttcaattcggctttattgctgtttttggccgctccgttagaaacagcgtctggtgatttgccgatagctttgaaagcgagtgccagcgctttttcagaagagactttttggctgttatctgtttttgcagcagattgattgtgtaattcaccattgaccgcatagacattatcggatttatcgacgtgaacgatcacttgcgaatctttaattggcactccgttaacgacaggcgcatatcgaaagtgcttgtatccaagggcatcagtcgtgctttcaacaagcttcagccttttggaaggatcacctttaaaaatgttgctgttctttttcaaaaactgcttgacagccttgtcatttggtgcagagagttctgattgcgcaatcgcatttttggagaggaaatttgtttgattctctttaagctgatgaccttcagcagcctgaacacctggcaggctgattgataaactcataaacgaagcagcgacagcaacagacaatttcttacctaaacccacaataaatccccctttttgaaaatactgaaaactttatattgttatattaaactagcattctggaatactcaacaaaaactaacataactagacaaaattgatagtattgtcctgtgtttgtttttgttgaataatatcaagatgagtcaagtgtcatgtggtggttcattcaagagttatgttttttacatatcaaggggaagatgagatatttttgtttcatcttgaaactttttgaaaagtccgctgtctaaccgaatgaggccttaataagaagtaaaggattgttgttcgtgttggagttattcagtcattatgtattgcatttcgaacgttattttatattaagcagacaaagcaccctgctgattcaatggtcaattgttgttctggcgggtttatatcttttggggcatcatcccaaaataaaccggcagcgcacaatgttcatggcgggtgttatattgcggattgtgctgctggcgggagtgtctgttgaacttattcaccaagtgcaatcaacaaacttcaccagcgcttacttaagagaggacggaaatgaactgctgccgctgctgcattttttgttatacggatatgtgctgctaacggcttttcactatatgctgatgccgcgtgatcatggcggaaagggtaagttttatacgttcgaccttgccgttgtcagtttgccaatcgtacaaatgatttttagtttcttttcgtattggaaggaatacccggatgggatggagccgattgcattcgtgtttctgtttttcatcatcactcttcccattgcgttgaatgtagtgtttttcaagctgcattggagaacggataagatcttactaggcttattttatacgctgattatcggactgcttgtcttgctgcttgtgccatatcccaatcaaatctcaaaagattatggtgcagtaatgccatatacgatttatttggcaatggcgggatttttgatgagctatcatctgttccaaaagtcaggaaaggtttatgtgcgtgtgaataagtgggtgacgatggctgtcctggtgttttttgtcctgctgttaaatccgatatataacataggaacggctgctttcgctgtatcaaagccagcaaatgtccatgattcattcaattttgtcggggagcacatttcatcagaaaaagcggaacagatactaaagtcattttttcctacggatgaaacactttatttgcacgatacaaacatggatgtgcattatttctactcatttgaaagcaaaggttacaaagctgaggtagatgaagtatcgcagctgattcgtaattatgaatacttacaaaaagcacatgggaaaaagctaacgaatcaggagtacaagcgaaagtccatcgctttccttgagcgacacggacgtgtgttacataaggatcatatcgaaacaaaggtatctcaagaagacggccagacagtcgtacgtatttacctgaaaaaccagcttcataaaaaagatcatgctgatgatggcgcggtattttattgggaaaaggaaaccttaatggggtttagtgaagatccttcgatttatcagcttgactctcttctgcatgttcatataacggaacaagacattcacgacaaagtggaacaaatgtttacagcgctgaacatatcaaaacagccttatcagatcactgatattgaaagcgacagcctgcttggaagcatggtgagagttgaaacaaaaggtggaattgttttggaatttgagggcgaatcaggttgtttacatagtctttcgcttccgatgaaaaagaatatctcaatggctaacagccggctgcagcatcagatattatcgatcttcgatgctcgtggatcagaaaagaagaaaaaaagcagtcagggtgacatggtgatgtatactgattcttctaaaacatatgagtttgttgaagctcaaggtcagctaaacgtttatgtatacagcgatacacctgatcagtcattcccctatacgtatcgtaatggaacattggcttacgaaaaagtagcttctctatatcaggatgtcatttacaaaaagcgtatgcgtccgattatcgttcaaagaggggatgaacggcattatgcatggctgatcattattcagccgtttggttcaaatcgccatgatgcctatgtagtggatggagaaacacaagaggtgaaaagtctttatgaatcataaagaaaaagagtctgtttttgtagacttatacgacctgtataaagaaggagagctagaggatgaatcaatggaatggatgaaacagcatgaatccctatttcaaaagaatgcggaagacttaaagagtaaaacttgtttaaagagaagtcccggtgctgaagaagaaagccaaatcagatatatgaaagtatacctgtcttccatgtatatctgtttcattttattggccatttggatgacggtgtggttttacttttaatgaagcatagggattccattgaggacttgtatcggcagtattatcaagaaattttaaattatttattcagaaggactcatcatcttgaaacagccaaggacttagcgcaggacacgtttgtgaaagctcttaatggtctggcttcgtttagggggcattcttccatcagaacatggctctacaccattgcgcatcatacctttatcaattggtaccgaagggatgtcaaataccaatttactgaaatcagcaaaaatgaagggttaacgcaaacaacttatgagcagcctgaacagtatctgtcacgaacggtgaaaagcgaaacactgcggcaggagctcctgaagttaaaagatcagcatcaatccgttttgattttaagagaattccaagagctttcttatgaagaaatcgctgagatattgggatggagtctttctaaggtgaaaaccacattgcaccgggctagattagaacttaagaaacacatgacgaaaagtagagaggaggagcggatatgacctgctttctagtaagagacctgcttcctctgtatcttgaaggtgattgtaaaagagaaacggaacacgttatagaagagcatttaaaaatgtgcagcagctgcagagacatgtatgacacgatggctgagccatttgaattggaaagcgaacaggccgttgaggaggcttatctgccggaagaagaactgcgttttaaacagaggtactatggattactgatcatgaaagctgcctgctggtttggagcggtggttgccatgatgctgatcatcaaactgctgatataaaaaaagcgcttgtccgattccggcaagcgcttttttacattaagcctggggatgaatcatatcgtaaatagcggcaagctgttcttgtgacagggcactgaagagtttttcataaacgtcagcttgcagtggcgttgcacctgcttgtagcgctgcgtctttatcatagctgtacacatcatcttgtagcacaatggctgcttgaagaatgtgaatcttgagagaaacagcggagaaaaattgttcaagtgcaagtgcttctttttctgtgaagccaagttcaattgctttttctgtatcaaatttgtaatttccatcctcgagatacacacattgtgaaacaatgctgaaaaattctgatgtcgattcccagagtgtagcaattacctgagcctcttcttttgtcattcctaactcgacagctttttcgctgtcaaaataatatacaccgtcttgttcgtaaatacattgatttaatatatcaatgaatgtattgagatcttcgttagtgctcgcctgatgctggagttgaacagcagtgttatcaaccggtgtttttgcgctggctgcatcagaaccgaacgttaatagagcagctgaggtcattgcggcagtcgttaacatagctttttttacaaatgttttcttcatgtttcttctctcccttttatgaattgtgctacaaattccattatagggagtagtttccggtgaaggaataggcgctatggtattttatgtgtatcgttgccgaactactttttgaaggctgcacgtgtgatcgttagaacgattgtctatgtatgaaggctgttttgcatcttcctgactaagaaacaggggagataaggcttaaagaaatgaaaaacaccgctttctttgcggtgttttttgattacaatgtcgccggcggggcaatgcttttaatcaagcaagccttgttcgcgcattttcttttttaatgtaaatccgccgcccatgacagcgcaaacaagtacaatgctggcgataatgcctgcagggcttttttcagcgataaagacgccgatcagcataatgctgaaaaccgctgcaaatgcaaataatagtaaaagccaattcatttttttcataaattccatccccttttacgtcttatattaagtttacagaaaaacgtgacgcttttaaagaggatgtgtgatataatatgaaagttatctaatttttttaggagatgaaaaagtgaaacttcgaaatgatcttcgcaacatcgcgattattgcccacgttgaccatgggaaaacgactctagtcgatcagcttttacatcaggctggtacgttccgtgccaacgaacaggttgctgaacgcgcaatggactctaatgatcttgaacgcgaacgcggcattacaatattggcgaaaaatactgcgattaactataaagatacacgtatcaatattttggacacccctggacacgcagactttgggggagaagtagaacggattatgaaaatggttgacggcgtagtgcttgtcgttgacgcatatgaaggctgtatgcctcaaactcgttttgttctgaaaaaagctcttgagcaaaacctgaaccctgttgttgttgtaaacaaaattgaccgtgactttgctcgtccagaggaagttatcgatgaagttctggatctgttcattgagcttgatgccaatgaagagcagctcgagttcccagtggtatatgcttccgcgattaatggaacagcgagtcttgatccgaaacaacaggatgaaaacatggaagctttatatgaaaccattattaagcatgttccggcacctgttgataatgcagaggagccgcttcaattccaagttgcccttcttgactacaacgactatgtaggccgtatcggaatcggacgcgtattccgcggcacaatgaaagtcggacagcaggtttctcttatgaagcttgacggaacggcaaagtcattccgtgttacaaagatttttggtttccaaggcttaaagcgtgtggaaattgaagaagcaaaagcgggagacctagttgcggtttccgggatggaagatatcaacgttggtgaaacagtatgtcctgtagaccatcaagatccgcttccggtgcttcgcattgatgagccgacacttcaaatgacatttgtcgtgaataacagtccgtttgcaggccgtgaaggcaaatatgtaacggcccgcaaaatcgaagagcgtcttcaatcacagcttcagacggatgtgagcttgcgtgttgagccaactgcttctcctgatgcttgggttgtttcaggacgcggtgagctgcacttgtcaattttaattgaaaatatgcgtcgtgagggctatgagcttcaagtgtcaaaacctgaagttattatcaaagaaatcgacggcgtacgctgtgagcctgttgaacgtgtgcaaattgatgttcctgaagagcatactggctctgtcatggaatcaatgggtgcccgcaaaggcgaaatggttgatatgatcaacaacggaaacggccaagtccgtctcatctttacagttccttcccgcggattgatcggttactctacagaattcctatcattaacacgcggattcggtattttgaaccatacgtttgacagctaccagccgatgcaggcgggtcaagtcggcggacgccgtcaaggtgtacttgtgtcaatggaaaacggaaaagcaacatcatacggtattcaaggaattgaagaccgcggtgtcatcttcgttgagccgggtactgaagtatacgaaggaatgatcgttggagagcataaccgtgacaatgaccttgttgttaacgtcagcaaaatgaaacagcaaacaaacgtccgttccgcgacaaaggatcagacaactacaattaaaaaagcgcgcatcatgtctcttgaggagtctctagagtacttaaacgaagatgaatattgtgaagtaacacctgaatccatccgtttaagaaagaagatcctcaataagaacgaacgtgaaaaagcagctaaaaagaaaaaaacagcaggattgtcttaatctcgtgcagaatttgaaaagatagaacccgtacgtttacaggggagggaatctttttgaatgacgtaagcgaacgtctgtcgttcttcgccgctctatatcaagtagaccggcagcctgcggcaggcatgtggctgctgtacggcacgatttttgtgttggccgttattgtatttaagcttggatttgctaaacggcttcctgtattaaaatctgcagtggtgtatgtatttttggcgttgggctgcactgttttgacttttttaggggtgtttttgcccgtggcagaaggattggtcgtcgctgcgctgattttaatcacttacaaaatccggctgtatcagtcgaaaaaaggacagtctgcaaaatcataaaagactcagctgaaagctgagtcttttttgtgttctgtatggttaagcggccgctttattttttgactttttcttttttctgctgtcccgggtgaaaagtaaattttcccgttttcagccgttcctctgtttttttggcaatccgatcgtgacattcctggcacatatatgtatggatcgggcggtttcgaagccgtttcgcgatcagggtatcatcatcaattgtttcaattttatcgcaaatagaacatttgaccctcatcatatcacctctttcactaacatgtattatagcacggatcagaagctgtccaaaataagaaaaagctaaagcgcaaggctatagcttagtcattgttgttctttttcatatgatgatcagattgatcgttttgctccttctccatttcctgctgctgttttctatttaattggtcattttgctgctttgtttgcggttcgtcttcattgtcaatcacgtcgttaggcacttcgggaagcactcggccgacaattgcagctaattcatccagtatgcctgttaccggatggccctcgctgatttctctgctcatttcacgaaggcggctgaccgtatcgggatcagcaatgaccactgcgtttgcgccatatcgatcattctttagcgcctgagctacagaatatttaatggtttccactttgcttctgtccaaagtatcatcgacatcaatcccaacaacagcatagcctcccagcacaacggctgttgcatccttgacgtcggggtttttttcagcaacgctgacaagatgcttggcaatatcggttcttgttccattgtcttttgtttcttgagttgtgtcctttacgtgaatcggtttagtctcctgctgtcttgttgattctttttcaacattctgaccctgttttccttgttgataggcacaagcggacaggataagtgtcagctgtatgataatgaaaagaattcgcacttgcgggttccctccttaaaatgctttcattaattttattgttgaattaaccttctatctttatgcacaaaaacatatattttagcaggcattcacctttttcatcaaaagagaagcaggaagaactttgacccttatatcaggaggctgagacttgagtaaaatttatgtgttagatacgaatgtgttgttacaggatcctaacgcaatattttcttttgaagaaaatgaggttgtcatccctgctgtcgttttagaagaggttgattcaaaaaaacggtatatggacgaagttgggaggaatgcaaggcacgtatctaagctaatcgatgcgctaagacaaaagggcaggctgcatgagcatgtaccgcttgacaccggcggcacactgagaattgaactgaatcatcgttcgtttcaccagctgcaagagatctttattgaaaagacgaacgataatcgcatattagccgttgcgaaaaacttaagcctcgaggaagaaaccaaggaaaatggcaggccggttatcctcgtcagtaaggatgtactggtcagggttaaagccgacgcaatcggactgcttgctgaagatttcttgaatgaccgggttgtggacaatgatgaaatgtacagcggctataaagatttatatatcagccagcagctgttcagctctttttacggaaaaaatcaaatttcagtaaacgatgtgaaacagcatgcgttttatccgaatcagtttgctttaatgaaggatgagctaggaggatcctcctcggcagtcggaattgcagataaaaccggaacggtattaaaaagactcgtatttgatgatgaacatatatggggaatcaggccgaaaaatgtacagcagacaatggcattagagcttttgctgcgggaagatattccgcttgtcaccctgatcggcaaagcgggaaccggcaaaacgctcttagctttggcggcagggctattacagacagaagacttgggaatatataaaaagctggtcgtcgcaaggccgattgttcctgttggcaaggacatcgggtatttgccaggcgaaaaagaggaaaagctaaagccttggatgcagccgatttttgacaacttagagtttctgtttaatgcgaaaaaaccgggggagcttgatgctattttggcgggaattggctcaattcaggtagaggcgctgacttatatcagagggagaagcattccagatcaatttattatcattgatgaagcgcaaaatttgaccaggcatgaggtgaaaactttgctgacgagagtcggtgagggcagtaaaattgtcttaatgggtgaccctgaacaaattgatcacccatatttagacagtctgaacaatggtttagcctatgtggttgagcggtttaaaggacaacccatctcaggcagcgtgaagctgttaaaaggtgagagatcaggtctcgcccagctcgcagctgatttgctgtaacattaaatgatttcgatctcttttacgtcggtaatcggctgtttgtgatgaaccgggtcttcaaagtaaatatgcacggggccgccttcttgaatcggcttgcctgcctcactgaaatggacaatactgttcagagcggtttccagagaaacggcggcctttcccgaacttgtgacaaatacacattgcgtcgcagagctgttcggctcagcatttttcaggacagtcccaagtctcattgcgaaactgccgttcatcagtttttgcttctcatattgcttttccgtctttaatgtaggcggcgcaattcgcccctctctgatgacgcgttccggatcaaggtcggattcatccccggctgattgtaaatatatgtcttgactgtcccctttgcggtcaaacgaaaatttgcgatcatcaaaaatccatacgcttggatcaatggtaattgggtatgtaacattgccttttacttggataacgctcatgatatgacccccttctctcaaaattataaaagttttcgcatgaattgtcactttgtgtacaaattatgtgtattgaaatgctgagggaacgagggtgtttgcatggtatgccggcataatgatgagcttgaagccttagtgaaaaaggcgaaaaaagtaacggacaagggggagatagccagctatattcccgccttggcaaaagctgataaacacgacctgtcagtagcgatttattattccaataatgtttgtctgtcagcaggtgacgtagaaaaaacatttacgcttcaaagtatatcgaaagtcctttcccttgctttggtgttaatggaatacggcaaagataaggtcttcagttatgttggacaggagccgaccggtgatccgtttaactcaattatcaagctcgaaacggtgaatccgagcaagccgttaaaccctatgattaatgccggggcattggtagtgacaagtctgataagaggaagaacggtgaaagagagacttgattatttgctttcttttatcagaaggctgacaaacaaccaagagattacatactgccgggaagtggctgaatctgaatacagcacttcaatgattaatcgggcgatgtgttattatatgaagcagtacggcatttttgaagatgatgtagaggcagtaatggatttatacacgaagcaatgcgcgattgagatgaacagcttggatttagcgaaaatcggatctgtatttgcattgaacggcagacatccagagactggggagcaagtcatctcaaaagatgtcgctagaatttgcaaaacatttatggtgacgtgcggaatgtataatgcaagcggggaattcgcaattaaggtcggaattcctgcgaaaagcggcgtatccggcgggattatgggcatttcgccttacgatttcgggatcggcatattcggccccgcattagacgaaaaagggaacagcattgcaggtgtaaagcttttggaaataatgtctgagatgtacaggctgagtattttttaatttatgtcatatgcttaaatcctcttgcattttctgttgataccctttatgataaatagaagaattaggtactcgcctggggaacggagggatacttttggcttcagagatgatagttgaccatcggcaaaaagcttttgaactcttaaaagtggacgctgagaagattttgaagctgatccgagtacaaatggataacttaacgatgcctcaatgtcctctatatgaagaggttttagatactcaaatgttcgggctttcgagggaaatcgattttgctgtccgcctgggattggttgatgaaaaagacggtaaagaccttttatacacattggagcgcgaattgtctgctttgcatgacgcgtttacagctaaataaatgataaaactcaaacttattaacagtttgggtttttttataaccgctatttttctctcatctcataaaagacggtctttttttacacattccttccgaatcgtatagagattcttcgtctcgtttgataaattgtagtaaaataaaaaagataaatacataaaaaccatagataatggaagttagaagcagggaagaggatgttatgttaaaaaaaatgctaaaatcttatgattactcactgatattcgcaatcgttttattatgcggattcggtttagtgatggtatacagctcaagcatgattacggctgtctcccggtatggagtaagcagtaattttttcttcatgcggcagctgtttgctttaattgcgggtggcgctctatttattctcatggcgttgtttccttataaagcactggcccatcaaaagtttcagaaggggatactgcttgtatctgttcttgcgcttatctcactgtttgttttcgggcatgttgccggaaacgcgcagagctggtttaaaatcggcggaatgagtattcagccgggggagtttgtgaaactggtcgtgattttataccttgcagccgtatatgcaaaaaaacaaagttatatcgaccatctgttaacgggagtagcccctccggtagtcatgacgcttgtgatttgcgggttaattgccatgcagcctgatttcggtacagccatgattatagggttaattgcgacgtgcatgatcttgtgctccggtttcagcggaaagacgctggtgaggcttgtgatactgggcggaattgttttcattttagtcagcccgattatctatttgaatcaggacaaaattttaactgaaggccgtttagcgcgttttgagagtcttgaagacccatttaagtatgcaaattcatcaggtttgcaagtgatcaattcttattatgcgatcagctcaggcggcattttcggcctggggctcggtgaaagtatccaaaaatacggatatctgcctgaatcacacactgactttattatggctgtcattgctgaagagctcggcatttttggggtattgtttgtgattttcttattgggttttgtcgtcataaaaggtttttatattgccagaaaatgcgaggacccgtttggaagtcttctggcgatcggcatttcaagcatgattgccatccagtcgtttattaaccttggcggtgtcagcggattaattccgattacaggggttacgctgccatttatcagttacgggggctcttctttggtgctgcttctggggagtatggggatattagcgaatatcagcatgtttgtgaaatattcagagaataagaaaaagaaagagcccttggcgccgaagggaatgaaaaagaaacagctcaaaaaaactgtttatctgtaaaaaacaagtgtgtacaggggaaggatattccgctatgatagattatattccattcgggtaagggggagaaaagtttgtctcagcaatcgatacaaaaagtattagtagcaaacaggggagaaattgcaatccgaatattccgggcgtgtaccgagttgaatattcgtacagttgcggtctattcaaaagaagattccggttcctaccatcggtacaaagcggatgaagcatacttggtcggtgaagggaaaaaaccgattgatgcttacctggatattgaaggtatcattgatattgcgaaaagaaacaaagtcgatgcaattcatccgggatacggtttcttatctgaaaatattcattttgcgagacgatgtgaagaagaaggcatcgtattcatagggccaaaatccgagcatctcgatatgtttggtgacaaggtaaaagcgcgtgagcaggcagaaaaagcgggaatccccgtgattccgggaagcgacggtcctgccgaaacgcttgaagccgtcgaacaatttggacaagctaacggttatccgatcatcattaaagcctcgcttggcggcggcggccgcggtatgcggattgtcagatctgaaagtgaagtcaaagaagcatatgagcgtgctaaatcagaggcgaaagcagcctttggcaatgatgaagtttatgtagaaaaattaattgagaatccgaaacatattgaggttcaggtcattggagacaagcagggaaatgtcgtccatctttttgagagggattgttccgttcaaagacgccatcaaaaggtcattgaagtggcgccgagtgtctcgctgtcacctgaattaagggatcaaatttgtgaggcggcagttgcgcttgctaaaaatgtaaactatataaatgcggggacggtagaattccttgttgcaaacaacgagttctactttattgaagtaaatcctcgcgtacaagttgaacacacgataacagaaatgattactggtgtcgatattgttcaaactcagatccttgttgcccaagggcacagccttcacagcaaaaaagtaaatattcctgagcaaaaggacatttttacaatcggctatgccattcagtcacgggttacgactgaggatccgcaaaatgatttcatgcctgatacaggaaaaatcatggcttaccgctcaggcggcggttttggtgtccgtcttgataccggaaacagcttccagggcgccgtgatcacaccatactatgattcacttctcgttaagctttcaacttgggctttaacgtttgaacaggcagctgccaaaatggtacgaaaccttcaggagtttagaatcagaggcataaaaacgaacattccgttccttgagaacgttgcaaagcatgagaagttcctgacagggcaatatgatacgtctttcattgatacaactcctgaattatttaaattccctaaacaaaaagaccgcggaacgaaaatgctcacttacatcggcaatgtgacagtgaacggcttccccggaatcgggaaaaaagaaaaactggcgtttgacaaaccgttaagcgtaaaggtagacgttgatcagcagcctgccagaggaacaaagcaaattcttgatgaaaaaggtgcagaagggcttgcaaattgggttaaggagcagaaatctgtccttttaactgatacgacattcagagatgcccaccaatcgttattggcaactagaatcagatcgcatgatttgaaaaaaatcgcaaatccgacggctgcgttatggcctgaactattcagtatggaaatgtggggaggcgcgaccttcgatgtagcctaccgattcctgaaagaagatccgtggaagcgtttggaagatcttcgcaaagaagtgccgaataccttattccagatgctgcttcgctcatcaaatgcggtcggctatacgaattatccggacaatgtgattaaagaatttgtgaagcaatcagctcaatccggtattgatgtgtttcgtattttcgacagcttaaactgggtaaaagggatgacgttagccattgatgctgttagggataccggcaaagtggcagaagctgcgatttgttatacgggagatatccttgacaagaaccggacgaagtacgaccttgcatattatacatcgatggcgaaggagcttgaggcggccggagcccatattctcgggattaaagatatggcagggctgttaaaaccgcaggctgcatatgaactcgtttctgcgttgaaagaaacgatcgacattccggttcaccttcatacgcatgatacgagcggaaacggtatttatatgtatgcgaaagctgttgaagccggcgttgatatcatagacgtggcggtcagctcaatggcgggattaacgtcacagcctagcgcgagcggattttatcatgcgatggaaggcaacgaccgccgtccggaaatgaatgtccaaggcgttgaattgctgtcccaatattgggagtcggtgcgtaaatattatagtgaatttgaaagcggaatgaagtctccgcatactgaaatttatgaacacgaaatgccagggggccaatacagcaacctgcagcagcaggccaagggagtaggccttggcgaccgatggaacgaagtcaaggaaatgtacagacgcgtgaacgatatgttcggtgacatcgtcaaggtaacgccttcctcaaaagttgtcggagatatggcactttacatggtgcaaaacaatctgactgaaaaagacgtttacgaaaaaggcgaatctttagatttccctgattctgtcgtggagcttttcaaaggaaatatcggccagcctcatggcggattcccggaaaaactgcaaaagctaatcttaaaagggcaggagccgattacagtcagaccgggcgaactgcttgagccggtgtcatttgaagcgatcaaacaggaatttaaagagcagcataacttggaaatttcagatcaggatgctgtggcatatgccctttatcctaaagtcttcactgattatgtgaaaacgacagaaagctatggagacatctcggtattagatacaccgacattcttctacggcatgacattaggtgaagagatagaagttgaaattgagcgcggcaaaacgctgatcgttaagctgatttcaatcggtgagcctcagcctgatgccacccgcgtcgtttatttcgaactcaacgggcagccgcgtgaagtagtcattaaagatgaaagcattaagtcttccgttcaggaaaggctgaaagcagaccggacaaatccaagccacatcgcagcttccatgcctggaacagttattaaggtattggctgaagcaggcacaaaagtcaataaaggtgatcatttgatgattaatgaagcgatgaaaatggaaacaacggttcaggcgcctttctcaggaacaatcaagcaggttcatgtgaaaaatggtgagccgatccaaacgggagatctgctccttgaaattgaaaaagcataataaacaaagagtgtatatcatttgatatacactcttgtttttttatatagaaaatgtggagtgaaacagatggttagaagagatataaggggacttcagagattatacaatactgtcacaagcccaaaataaatagaggcttatacagccaatattttagatgctttgtagtatgccgtgcatatttctttaagcactatctgatttaaaaggctttaatacttatgttcgcgggctatagatgcatatgaaatttctataatcacgatgagaaaggggacagcccgaagtgagccgctcactgatcatcaagttcagcgaaggctggcgattgaaacaataaagcgccaaaacaagacctgaaaaaagaccaaagccgcctaaggctttggtctttagtccttatgattgactagattcgtaacggaaacgagcaatcaataataagaagtagcatagaacgccaaacagacaggcaataaagaacgagtgggcaagtgcaaagcccagagccagttcagagtatacgatcataatcccggacagtgcctgtaatgtaatgaaaataagacatgagatccatccccaaaagatctgtttttgatctttataggagataatagcatgaacagcggcaacaataatccatacaaataacagtaaggctgctgctctgtggcccatttgcacccattcatggaattgggtcggaagcccattgttcagcgggctgcacagcggcacatcaggacatgccagacttgattcagtgtgtcttacatatgcgcctgtatacacaacgatataggaatatattaaaattcctatcatgtgaaattgcatctttttgccgatttgaagcggcttaaccagtgttctgactgatttatcagcttcaaatatgagcaatgttaaaataagcactgaagcaaaagaaattaatgagatgccgaagtgaagcgccataatcagcgcgttcgaaccgaatacgacagccaatgcgccaagcaatgcctgaagaaataaaaagataattgacatgatcgcgagaaacgttgtttcacgaaaaatcggcgtgatttttctccatgaccaaaacgcaaggcttaacacaaggacaatagagattccgcttgcgaatcggtggctccattcaataattgaagccggattcagttcagggaaaaaacggccgtgacacagcggccactgtctgccgcatccttggccggaacctgtttttgtaacgagggcacccccgattaaaacaattagcatgacaaatgtcgtcagaacaccgagagcttttaatgctttattcatacaatattcaccttcttaacatactgctgcaattttatatacgttccaagtgtaagcgaatatgtgttttgtggcaattcccagagccttttgttcacaaaaatataatagaatgacggcttctggaaaatgtacacttgattattcatgccgggtctgatagaaataaggtaaacgcaatgccgatttggagattgccttcatctttggtaaaattcataaaaagttcacaaataaattcctgtttgtcgtttaatatttaataggatgtttttttacaagatgttatcttgtatgatagagttgcaggttattttattctcctgcgttaggtttgtaagggaggtttacgttatggctaactccagaatcttaaatgatacagctatagacggacaaattgaagaaacaacggcatggaaagattttctgtcccttattaaaatagggatcgtcaattctaacctcatcacgactttcactggaatgtggcttgcactgcatatatccggtttaagttttttaggcaatataaacaccgttcttcttacgttaatcgggtcttcactgattattgcgggctcctgcgcgatcaataactggtatgaccgggacattgaccatcttatggagcgtacgaaagtaagaccgacggttacgggtaaaattcagccgagtcaggcgttatggtctggaattttgctggttgctttaggattgatcatgctgctgatgacaactgtcatggctgctgttatcggttttatcggagtctttacgtatgttgtattgtacacaatgtggacgaaacgccgctatacgattaacacagtagtaggaagcgtttccggtgcagtgccgccgcttattggatggacggcagtggaagggaatatcggtgtcgtagcatgggtgttattcatgattttatttatttggcagattcctcacttcttagcattggctattaagaaaacagaggattacagagctgcaaatattccgatgcttcctgtcgtatacggatttgaagtgacaaaaagacaaattattgtgtgggttgcgtgcctgatgccgcttccgtttttccttggtagcctgggtcttccgattgtcattctcggcttgctgttaaatatcggctggctgattcttggcttaatgggattccgctccaagaatatcatgaagtgggcaacacaaatgttcgtttactcgcttaactacatgacaatctatttcgttgccatggttgtcttgacgcttttctaaaaaatagatatgatgcttgttttatcgcttcaaaataaacgatgacaactagtaaatgccgccttgacctcttgtttaatcaggcggctttacttttatacatagatggcattttgagtaaaaaaactcataatttaagagaagaggaaatgtaagtgctttattggtgataggttggatggcgatagatttcgatccgctttccgcctttgtattgaccagaaaaggggttgggtgaaatggtaaagcattggcgtcttattttattattagccttagtgccgcttctattaagcggatgtggaaaaccttttttatccacgctcaagcctgctggcgaggtggctgataaacagtatgacctgacagtgctcagcacattgattatggtggttgttgttgcagtagtatctgttatcttcttttatgtgattgtgagattcagaagatcacgggtcggtgagaacacgataccgaaacaggtagaggggaataaatttttagaaatcacatggaccgtgatcccgattttgctgctcattattcttgtgattcctgttgtattatatacgctggagctagcggacacatcaccaatggataaaaaaggccgcaaagctgaggatgctcttgtagtcaatgttagggcaaatttatactggtgggagtttgagtaccctgattacggcattatcacaagccaggagctgattgtaccgacagatcagcgtgtatattttaatttaaaagcctctgatgtaaaacattccttctggattccttcagttggaggaaaacttgatacgaatacggataatgaaaataagttcttcctgacatttgattcaaaacgaagcaaagaggcaggagatatgttttttgggaagtgtgcagagctttgcggcccttcacatgcgctgatggattttaaggtgaagacgatgtctgcaaaagaatttcagggctggacaaaagaaatgaagaactataagtctacagcagagagcgatttggctaagcagggtgaagaactgtttaaagagaaaaactgcctgagctgccatgcggtagagccgaatgataagcgtgcagaagccgctagaacggcacctaacttggcgaccttcggtgaaaggacaaaagtggcaggggtgaaagaggccaacaaagaaaatgtgaaggcttggctgaaggaccctgacagtataaagccggggaacaaaatgacaggcacatatccaaagctctcagacagcgaaacagatgcgctttatgaatacttaaaaggcttaaaagcggaaagcaagtagggaagaaagggagatattgggggaggtcacatatgttgaatgcgcttacagaaaagcggacgcgcggatctatgctttgggattatttgacgacggtggaccataaaaaaatcgcgattctttatttagtggcagggggattcttctttcttgtcgggggaattgaagcgatgtttatcagaattcagcttgcaaagccggaaaatgcgtttctcagtgctcaagcgtacaatgaagtaatgactatgcacggaacgacgatgatctttctggctgcgatgccgctcttatttgccttgatgaatgcggttgtgcctttgcagatcggggctcgggacgtttcgtttccatttttaaacgcgcttggtttttggctcttctttttcgggggcattttcttaaatctaagctggtttttgggcggagcgccagatgcgggctggacatcatatgcctcactttcgcttcattctaaagggcacggcatagactttttcgtcctcggactccaaatatcggggctcgggacgctgatagccgggattaactttttggccacgattatcaacatgagggctccgggcatgacgtatatgaggctgcctttgtttacatggacgacatttgtggcctcggcattgattttgttcgcgtttccgccgcttacggttggattggctctcatgatgctggatcggctgttcggaaccaatttctttaatccggagcttggcggaaatacggtcatttgggaacatttattttggatttttggccacccggaggtttatatcctaattttgcctgcattcggtattttttctgaggtcatccctgtgttcgccagaaagcgtttgtttggctattcttcaatggtttttgcaatcgtgctcattggctttctgggctttatggtttgggtgcaccacatgttcacgactggtctcggcccgattgcaaatgcgatttttgcggttgcaacaatggctatcgcgattccgaccgggattaagatttttaactggctgttgacgatttggggaggaaatgtgaagtatacaaccgctatgctgtatgctgtctcatttattccatcctttgtgctcggcggtgtgacgggagtcatgctggcagctgctgcggctgattatcagtttcatgatacgtattttgtggttgcgcacttccactacgtcattattggcggcgttgtattcggccttttagccggtgttcatttctggtggccgaaaatgttcggtaaaattctgcatgaaacgatggggaaaatttcatttgtattgttttttatcggctttcacctcacgtttttcattcagcattttgtcggcttaatggggatgccgcgccgggtttatacgtttttgccaggacagggtctggaaaccggcaacttgatcagtacaatcggggcgttttttatggcggcagctgttattcttctgctggtcaatgtcatatggacatcggtaaaaggtgaatatgtaggtgctgatccatggcatgacggacgtacgctggaatggaccgtttcttcaccgccgccggagtataactttaaacagcttccttttgtcagaggacttgatccgctttggatcgagaagcaggcagggcacaaatcaatgacgccggcggaaccggttgatgatattcatatgccaaacggctcaatcctgccgctcatcatttccttcggcctttttgttgcagcgttcgggctgctgtacagaagtgattacgcttggggtctgccggtgatctttatcgggctcggcatcacatttattacgatgctgcttcgttcagtaattgatgatcacggctatcatattcataaagaggaactgccgaacgatgataaaggggtgaaggcataatgcaagttcaagaaaaattcaccgcagaaacctttccagcttctcctgaaaaagtaaccctggaagggaaaaataaatttttaggcttttggctttttcttggcggagagactgttctgtttgcgtctctcttcgccacgtttcttgcgcttcggaattcaaatgccggtgatccgcctacgacggaaatgttcgatgtgacacttgtattcattgccacaatgcttctattaacgagcagtttaacgagtgtgtacgcgatgtaccacatgaagaacttttccttcggcaagatgcagctttggctgggaattacgattttattgggggcgggctttttaggactggaaatctatgagttcaagcattacacccatgaatttggctttactatcacaagctctgcccttggttctgcgttttacacgcttgtcggtacacacggcgcccacgtggcatttgggcttatgtggatcagcacgcttatgatccgcaatgccaagagagggctgaatctgtatacggcgcctaagttttacgttgccagcctttattggcactttattgatgtcgtgtgggtcttcatctttaccgttgtatatttaatggggatggtgggataaacatggtcgataaaaaaagcagagggcatatcaatagcgaccttgaatttaagaaaaaaaagcatgcccgggagatgaaatatcaagtcctgtcttttggtttaatgatcggtcttacgattgttgcatttctgactgtggccacggacggtgtcggcagctggtttacgattcctttcattattttgctagctgcaattcaagtcatctttcagctgtattatttcatgcatatgaatcagaaagggcatgaggcgccggcactgtttttgtattcaggggtgtttgtcgcgtttatcactgtgcttgcgtttgtgacaattatatggtggtaatttgaacagccgccggaggtgaagaaatgaatcagttggagatatttgggtttcgcgcgatgtggagcccttatcttttttgtatcctgttaggcattacggcgctttatctctatttttacaggcgaatgtcttcaaagccgaatcgaataactggtaaagagatggtgtgctttctgtcggcgatgctgtttttatatgcagccgagggaagcccggttgatctgctcggacatattatgttcagtgcgcatatggtgcagatggccgtcctgtatttggttgtcccgccgcttttgatcgcgggaattcctgcatggctctgggaaaaaatcattttcaggccttcaatcaaaccggttttttcctttttttcgacgcctttaattgctttgcttttgtttaacggcattttttctttatatcatgtaccgcttatatttgatactgtcaaaaccgatccattttaccatacattaatcacttggcttatctttgtgcttgcgttcttcatgtggtggccgcttgttcataaggttgagcgtctacggcagctcagcggcttgatgaagctgggttatattatggcggacggtatgctactcacacctgcttgcgccttgatcatgttcagcggtgcaccgttatacgccacctatacagatccggctttatgggctgaggcaatgaggctttgcgtgccagcggatatgatggggcaggtcccattaacagggccagagatgttgaatacactgcctttgttagaggatcagcagctcggagcagtcatgatgaaaatcattcaggaaattgtgtacggtacttttttggccgttatttttttccaatgggtgaagaaagaaagggaaaaggacgggcaggaggagccgccgtatattcagcagacgatatcataaaaggtacagcgaaatatgctgtaccttttcgttacatttgaactgtttttaacatgttggctatgtcctgaatcagtgccttgctttttgtcacaacctgtacgggaaactcttccgtttctccatattctactccatgcgggtagtaatgctttcctaggagaggggacattaattgaatcacggcgcgcccgcttccgacatcgccttctgccgcaataccttgtatccgcaggtaaaacgtaccctcaatcgtcgaaaacttcttgtcataggtgactctctcgtaatcccattgacccgctctaatgagacctttgctttccattaagtcgtctagccagctgagctcagccttaaccccttcaagtccgctttcagtaaacttcaacactgacccctccttataaaaattacctttcctgacaatcatagtatgaaagcgttaaactttcaatgaatcttcttcttttgaaagtatgcaaaaattaaattttgacgacaatagcactagactaaaggaggttaaacggatgacaaaaataaaagatctgatgacagccgacttgcaatattgcacggtattagataatgtatatgaagctgcagtaaagatgaaggacgcaaatgtaggagcgattccggtagttgatgaggacggggaaacattggtcggcatcgtaaccgaccgcgatctcgtattaagaggaatcgccatcaaaaaaccgaactcgcaaaaaatcactgacgcgatgactgaaaaacctgtcagtgtggaggaagatgcttcagtcgatgaggttcttcatttgatggcatcgcatcagctcagaaggataccagttacaaaaaataaaaaactgactggaattgtcacgcttggtgatctttctttatctgagcaaacgaatgaacgtgccggcagcgccttatcggatatttccgaaggtgataatagagaagaaggcttttttcattaacacataaatctttgacatgttaaataggctgtattgtaatgggatgtaaacaagagattgtgaatcgccacgggggtgatagattgaaaaatatattgagagcaatggttatccttttgattatctgcggaacttatgttctgtttattcaatatggatctgttcctgaaaagaaatcaaatgacagcgagcctcaggtgtcgaatgaggaagcgcaaagcggcaaacgaatacatatgccgacttcagggttattgtccttcatgggcaagcccgccgatgaagtaacgaaaaagcttggggaacctgaacgtattgacccttcggcttatgattacgattggtgggtatacaatcaaggtaaggatcaatatatccaaatcggggtattaaacaataaagtggtcacattattcgcgtcgggtaatgatattaacgccaagcctttcaaaattggagaatcaactggcgaagtatttaagaccacccaggtggcaccatttgtgaatgtagagtataaaggaaattcctatcggtttgaattttctgaagaagatatcaatacaagaccgactgtaaaggtaggaaagatgtatgtccagctgtatatggacaaatttgaggggaagctatccagcattagggcgtttgatgcgcaaacctttgtaaagcaaagaccttatgaggtagtgtaccgcggggaattaattaaaccgaaagccgtttcagatgagaaatggaaaaagatccaaacaacgagcgaaaagcaaatccttgatttgacgaatgtcatacgcgttaaacatggacttgcgaagcttgaatgggatcagccaacggcggaggtggcgtttggacatagtgaggatatgaaggaaaataattatttctcccatgtctctaaaaaatacggctcgctgaaagaccgcttagaagaagggcatgttgactttcagcaagcgggagaaaatatcgcatacaattatgtggacggtccggccgctgtagaaggctggctgaatagcgaaggccatcgaaaagcgttgctgaattcagattatacgcatcttggtgtcggagtagaccggaaatattacacccaaaattttattaagcgatggtaatgaaagccgcggacgaatggttcccggctttttctatttccatacaagctggtctgaatgaatgtgctgatagcttacagataaggccgtttcccattccttcagtcaggctttttcaccagtgtatagggatatcgctaaaaattcatttgggaatgaatataggcgaacacaatgcccgacaaaacgatacattgtagtaggtaacgattttcggagggggtgaggattgtggcgaatcaacatgccaatcattcaatcaatgactttaaacaattcgtcaaaaagcatcccaagctgataaaagaagtgcgcaaagaacaaagaagctggcaggacgtatatgaaaattgggtcctcttcggggagagcgacccgatttgggatccgtatcgggaaccggaagaagcttctgaagctgtgcctgaaacaccgcaaaaaaatgattttgtctcgaaaatggtgacagcggtgaaaaagatggatgtcaatcaaatgaacgaacaaatcaataaaatgagccagtcgatctcatcgttgcaaagccttcttaatacattttccggaagcggacagaagcattctcagccaggctctggacagcatcctttttcttttcgaaaggattaaaaaaggggagctcatatgcgcaaagaggttcaggaatatattttagcaaacgaagaacggaaacgattcatcagagaacagccgatatggtaccgcaggctttcaagaaaaccggatgatctgtcctcctttcagcttgaaatgatgaatttttatgaaaaaaccattccgcatcgggtgaatcagtttacgaacgggattcaaatggcgcaaatgatgatgcaaatgtttcaagcgatgcggacaaaagattaaaaggccccgaaaaagggtcttttttcatgcggacataaggttttgtatacggctgcggttaagcattttccaattggctggtttcatggtaaactaacaactggaggtgcatgttatgtatgcgacgatggaatccgtgcggcttcaaagtgaagctcagcagcttgccgagatgattctgcagtcggagacggctgagaactaccgcaattgttacaagcgtctccaggaagatgaagaggcaggtcggattattcgttcttttatcaaaataaaagagcagtatgaggatgtacagcgttttggcaaatatcatcctgactatagagaaatatcccggaaaatgagggagatcaaacgtgagctggacctgaacgataaggtggctgacttcaagagagctgaaaatgagctccagtccattcttgatgaggtcagcgttgagattgggacagctgtttcggagcatgtgaaagttccgactgggaacccttattttgacggtttgtcttcatgcggaggcggctgcagttcaggcggaagctgcggatgtaaagtgtcctgacgagactggccgtctcgtcttttacatataagagaaaacaggcaggtgattgtattggagaataggcgccagggcatggttgtgtatctgcactccctaaagcagagcaaaatgctgaggaagttcgggaatgtgcactatgtatcaaaacgattaaaatatgtcgtactgtactgtgatatgaaccaaattgaaaaaacaatggacaagattgcgtcttactcatttgtgaaaaaagtggagccttcttataaaccgtttttaaaattggaattcgagtcaaagcttgataaggcaaaagaatacgattataaaatcggcatatagctataaaaaaatccccgcaggcatctgcggggtccttctattccttaatatgttaaggagaaggcaaagggagaggagaaaccggaggaagaacttatggggaaacgtaagtcttctccgcggttggcaacaacatcctctagatgctgttgcttatagtatggacaaggatcatgctgcctatacacctgtttatcaagattagcgttcattgtttggaagaatgctttatgttaagataggattgatttttttctatgtacatagcggcgtccggccgaataaagaaacaaaatagcttttagaaaaagtggtgtggaacatgagagtaatttctggatcaaaaaaaggccgttcactaaaggctgtacccggaacatcaacaagaccgacaaccgacaaagtgaaggaatccattttcaatatgatcggcccttattttgacgggggcatgggacttgacttattcgcagggagcggaggtcttggaatcgaagcgctttcacgcgggtttgagcattgtatattcgttgaccgtgattttaaagcgattcaaacggtaaaatctaatttgaaaacgctggagcttacaaaacatgcacaggtataccgcaatgatgcggaacgtgctttgcacgctgctgctaaaagagaaagcggctttcgcggaatttttctcgatccgccgtataaggaacaaaagctgaaagcacttttaacgctgattgacgaatatcaaatgctggaagaagacggctttatcgtcgctgagcatgacagagaggtcgagcttcccgaaaccgtaggagatcttgtgatgacaagaaaagaaacctatgggttaacaggtgtggcgatttataaaaagagggggtagtgaggtggcgagtatagctgtctgtcccggcagttttgatccggtgacctacgggcatctggacatcatcaaacgcggggcgcatatttttgaacaagtgtatgtatgtgtgctgaataattcttcaaaaaagcctttgttcagtgtggaagaacggtgtgagcttctgagagaagtgacaaaagacattccgaacataacagttgaaacatcgcaaggcctgttaattgattatgcaaaaagaaaaaatgcgaaagcgattttaagaggcttgagagctgtatctgattttgaatacgagatgcaggggacgtcagtaaaccgtgtgcttgatgaatccatcgagacattttttatgatgacaaacaatcaatattcgtttctaagttcaagcatcgtaaaagaagtggcgagatacaacggctcggtatcagagtttgtaccgccggaagtagagctggcgcttcagcaaaaattcagacaaggatgagggttttgactcatcctttttttgttccgtttgtcagtctgtaagaaaaaatgataatgtacgtaaacagcgcgcatagtgtgacagcaggtccgatctgcacaagcagattccagccatttataaaggccgttggcatgtcactgctgttaagagatttaaatacatactgatatggatcatgccatgccgtgtaaagaggtttccataaaagcatgacgaagacagcggcataaacgccctgcagcaaacgtgcgataaagaatggtttaaatctaatgtcggtttccgataaaatacctgccacctgagcttgtacggaaaagccgctaaacccaagaataaagctgacgataatggctttttgcagaagagaaacatctgtctcgctgacaagcttgctgcctaatgtaatttcaaacatccctgataaaagcggaatgtccaattgagtcggaagctgaaacaaagtcagtgctccttttgtgaaaacagacaaaacatcagtcagctggaccactgacaacagccgattgaagacagaaaataaaataataaagccgcctaccataagaagcgtttgaacagaagacgtcacggcgtcgcctaaaattttacctaagggccgtttttctgcaagtctggcggtatgaagagcgtgtaaagcatctttgactgaagggaaaggtatcgttttctttcttctgagatgctgctcttccttgcggccataggagcgcattgttaaaccgacggcaagattccccaaatagtgtgcagaagctaataaaatgcctagtgatgcgttttgaaagaaaccgacggcaacagcgccgaaaataaagagcgggtttgaagaattggtaaacgacgcgagccgttctgcctctactcttgaaatctgattttcctgccgcagacgggcagtgagttttgcgcccgctgggtttcctgatgccattcccatagcaagaacgaagccgccgacacccggcacgcgaaagatcggccgcataaaaggctcaagcaaaacaccgacaaaccgcacaatgccaaagccgattaagagttcggacagaataaaaaatggcagcaatgacggaaacacaacctcccaccacatagacagcccggttttagaggcttcgaatgaggcctgtggatgtgagatgacagtcgctgttaaaaaaagaaaaaacgaggcaatcaaaagtgtattaatcttcgacaagttcattcttacctccccgatgctaaaaatgcccaatgacatgtatatcatgataaaataatgtatgatgtaaaacggccaagcagtacctgtcctcttgattctttgtactaatatacgagcataggggttcagtttagaccatagaattcggtatacagggaattcaggcaggaggttaacgctttggccaaacctaaaatcgggttagcgttaggatcgggaggggccagagggcttgctcatctcggtgtgctttccagtttacataagcaccaaattgaagtggatatgattgcaggaagcagcatgggcgctttggtgggcagtttttatgccgccggacatgacgtggcaacgatgaaaaaagtagccaaagcctttaaacgaaggctttatgctgattatacggtgccgaagctcggttttttaaaaggtgaccgcgtcagacagcttgtgcatgcttatacattcggaaaaccgattgaagagctccaaatcccgctgggcattgttgcgtgtgatctacagacgggagaaaagattgtgttccgaaaaggatcagtgtcagatgcagtgagggccagcatcagcatcccgggtatctttattccgcagcggctggacggacgccttcttgtagacggcgcggtcgtcgatcgaattccggtttctgttgtgaaagacatgggagctgatattatcatcgcttcggatgtttccagggttcgaaaaactgaaacagcagtgcatatttttgatgtgattatgcaaagtatggatatactgcaaaatgaattagtgcggcatcaaacaattgccgcagatatcatgattcgcccttcccttgaaacatacagctcaagctcgtttgccaatattgaagaaatgatatcggcaggcgaagaggcgacaaaccgaatgatcagcaagataagaaaagaaatagagaattgggagggctcataatttgctacgtaaaaaacattttagctggatgctcgtcatcctcatactgatcgcctttttatcatttataaaacttccatactatattacaaaaccgggagaagcgacagagcttgcttcattgataaaagtggagggaggctacccggaaaaaggaagtctgtccttaatgactgttaaagtgggaccggctaatccgtttacatatgtgtgggcaaagatgcacccttattatgaaattgttcctgatgagagcattaaggaggaaggcgagtcagataaggagtatatgaaaagacagctccaaatgatgaaaagctcgcaagaaaatgcggttatagccgcctatcaaaaggcaggaaaaaaagtcagctattcctttaacggcatatacgcaagctctgttgtagaaaacatgccggcaaaagggaaaatagaagtcggtgataaaatcatcagcgcagacggcaaaaactatcagtctgctgaaaagctgattgattatatcagcagcaaaaaagcgggagataaagtcacgttaaagatcgaaagagaagaaaaagaaaagcgtgtcacccttacgttaaaacaatttcctgatgagccggatcgggcaggaatcggagtttcgctttatacagacagaaacgtgaaggtagagcctgatattgattttgaaatcgaaaatattggcggcccgtcagcagggttaatgatgtcccttgaaatctataatcagctgacaaaaccagacgaaacaaaaggctacgatattgcgggaacaggtaccattgatgttgacggaaaagtaggcccgatcggcggcattgatcaaaaagtcgtcgccgcagacaaagccggaaaagatattttcttcgcgccaaatcaaaacggcgccagcaattccgattataagaacgcagtaaaaacagcaaaagatattgattcaaatatgaagattgtgcctgttgataccatgcaggatgcgattgattatttgaataagctgaaagcgaaaagcacctgattctcaggtgctttttctatacatttaaaaagtgttgttcatcttcgtcatatcgaatcggtgcatgtccgtattcctgtaggtcaaactcagttctcagcggctcttctatcggcaggctgtaaatcctgcttgcttttacgtccagatcgagagctggatgggagaaagaggacagtttgctgacaagcggaacagacagtgcttttttcttttcggataaataagcctgtccttttttcgtcatgccgagaagcctgatatacggcgccttatcgttgtcaagcagcttttgcatatcctgtttttttgttctggttaaaatgtgtgtattcatccgctggagccttgtccacgtatagcgttttgttttcagcagttccataaattcctgataggagctggattttctgatcgaacgaataattctgtgctctaaaccttcctccacctcgtatacttgctgtaattcccgtgccgttacagttgaaaggctgtattttaagtaagaaaagtagctttcaggtgtatgccacaatccgaaagatttgcggtaagctgctaattcacgtgcagatgcagcagggagaaaacgaaggcaggcttcgagattctggccaatcatcgcttttctaatgcttgtggcacttgctatatggttttcgccttcagggagatcggcatcatgatagtccgaagagattcgtgccgtagtataaggtttcataggatatcccccggttagaatcgaggtcacatactggtatcccaaaatgttatttggttttgacaagtcaagtgcactttcagtatgcaaaatggagctgaaggcgatagccgccgctgctgggtaactggccccctttttaagttcttctttaattcggtcattcaatatatgtttatgctcatcaataagctgtgctgtttctaaaaaaggcttgatatccccattttcactcccgaaaaacagcgcctcacattcaagttcgttcaggatggaaacactgccgcgtgcaaaaatgtctgctttttgcacggcataaagataaggcagctcaatgacaagatcaactccgctttgcagcgccatttttgttcgggcccattttgatacaacagcgggctccccgcgctgtaaaaaatgcccgctcatgaccgcgacagccgtgtcacatccggtttgccgctttgctgtttgggcatgataaaggtgaccgttatgaaagggattatattcaaccaccaatccgacagctttcatattttttccgcctttcttgctatgtttaaaaacgtatggtacatttgcaaatgaaaactcttacgccttatttttgttttaagtgtatgcatagcatattccgctgtcaacgatacttcaatggcagcattatgctgtaaagaaaaaatattgacaaaaacaatcttaaaagctataatcatgtttgttgctttcctgaggtgatacaaatgaaatggacgatttatcagctgcatcaaatgccaaaacaaagttttgagtttgatgaaacagttgagttaaatgagctgacaaagctgaattctgacattcgccgcatttctcccgtccgggtgaagggcagagcggatatcaaatccaaacaggtttcgtttgattttacaatttcaggcgaaatgattttgccatgctcaagaacactcgttgatgtcccgtatccatttgaaatttcaacaaaagaactgtttatatttcatcacacggatgatatagaagatgatgacgttcacattgttgaggacgatactatcgacttaactccgatcgtgaaagaagaaattcttttagaaatccctatgcaaatcttttgtgaatctgaacaagaaaaaggagctgctcctcaagaaggaaaggattggcaagtcatttcggaagaagacaagaagaatcaagttgatccgagacttgcagccctcgaaaagctcttaaaacaagatgatgaatcttaactctttaaggaggtgggaataatggctgtaccttttagaagaacttctaaaatgaagaaaagattgcgccgtacacatttcaaacttaatgtacctggtatgacagaatgtccgtcatgcggagagatgaagttgtctcaccgtgtatgcaaagcatgcggatcatacaacggcaaagacataaatgtaaaaagtaactaataagaaaagcgcggggtgaaaagccctgcgctttttctttttctcttcctgtcagcttgcggaaaatttgtgagtgcaaatagtctatctaatctattaccggcatatgtatgagataaataagctgacatggagggagattgaatttgaccattacaagacaagatgcttggactcaggatgaggatttgctgctggcagaagtggtgcttcgtcatattcgagagggaggaacacagctttcagcctttgaggaggttggaagggcgctgaccagaaccgcggcagcctgtggtttcaggtggaactcgtatgtgagaaaacaataccagtcaggtatagagcttgcaaaaaagcaaaggaaagaactgagaaagcaaatcggtgttcattcggtcaatatgccgaattccatgaagcagactgcctcggcatcgtcagaaggaaaacgagatttgtccattcaggatgtcattcaatttctcgaacaattcaaagaagcaccgtctgcacaagaatttcagcttgaaagggaaaaattgaaggagcaaatccaatcgctgcaaaaagagcttgaggatttgcggagtgaaaatcagacattgcggaatcagctagagatgacagaagaggattacaaggcactgatcgatatcatggatcgggccagaaaaatggttgtttcgaaggaagacggaagaatgaaaaaagcggctcaagaaacgtaaagaaacgcctgaaatgaaccggccctatagtaagaataggccggttgttttgatttctatgcagactctcccggtgtcatttcatgatccatatcaggatgccagatgagcgggttttcccctttgtcccgcgccatatcatacttaacagttttaaagttcattttgttccaaaattccgctgatttcattctcggatttgtccggatcggcattttgaatgattttgcaaattcaaccaaggctctcccgtatcccctgttctggtagcccggaagaacctcaagcttccacagctccaaataatcctggcggttgtcaaaatagggattcgatttgccgttaacttgatacagactcattcgtgctacaagtttatcgccaaaataaatcccgtaaaaaggcgaagtgctgtcattttcaataatattatcctgaagttcttcaagcattgaaagctcctgaatgccgtattctttgaatttcttgaattcttccagcgttttatagttgataagcagacgttctacctttgtcaaacaaatctccccctttgttgtttctacatatattgtaaacgctttatttaaaaaatccaaatatttaaactttaattttaagcacatgggatctttgagaagtaatttcttcttacttctgctatgataatacgtaaatgctaaattgggtgtgacatcatgaaaattggaattatcggcggaggctccgtcggtcttttatgcgcctattatttgtcactttatcacgacgtgactgttgtgacgaggcggcaagaacaggcggcggccattcagtctgaaggaatccggctttataaaggcggggaggaattcagggctgattgcagtgcggacacgagtatcaattcggactttgacctgcttgtcgtgacagtgaagcagcatcagcttcaatctgttttttcgtcgcttgaacggatcgggaaaacgaatatattatttttgcaaaacggcatggggcatatccacgacctaaaagactggcacgttggccattccatttatgttggaatcgttgagcacggagctgtaagaaaatcggatacagctgttgatcatacaggcctaggtgcgataaaatggagcgcgttcgacgatgctgaaccagactggctgaacatcttgtttcagcataaccattcggattttccgatttattatgagacggattggtaccgtctgctgacgggcaagctgattgtaaatgcgtgtattaatcctttaactgcgttattgcaggtaaaaaatggagaactgctgacaacgccagcttatctggcttttatgaagctggtatttcaggaggcatgccgcattttaaaacttgaaaacgaagaaaaggcttgggagcgggttcaggccgtttgtgggcaaacgaaagagaatcgttcatccatgctggttgacgtcattggaggccggcagacggaagctgacgccattatcggatacttattgaaggaagcaagtcttcaaggtcttgatgcagtccacctagagtttttatatggcagcatcaaagcattggagcgaaatacaaacaaagtcttttgagctttttcggtaacatgctatactcatttcggatcactaactatttattggagaaaggaagttctagaagatgcagctaactgaactttccatcaaaaatcagaatgtgtttgtacagcactatatagatggcaaagaagaaatgtcttcttttttgattacagtattcatcataaggacatgtggcgcgaaagaatggaagacttatcttcccggtttttcgcaagagaggaattggcggcgtacttaacctcttaccataataaattcggttcaagtgcgatgcagtctgccattgagaagctgaaggacccgtcaagtgccgcagtagtcggcggacagcaggcaggacttttaacaggaccgctttacaccatacataaaattatttcaatcattgttttagcaaagcaacaagaaaaggaactgcaagtgcctgtcataccaatcttctgggtggctggagaagaccacgatttggatgagattaattttgttcacacatctgaagagaatggacctgtgaaaaaaaagctgcctcagtcttattggaagaaatcatcagcagcgagtacatcgcttgatcaggaaaagtgtgccgcgtggatagatgatgtttttgccgcttttgaagaaacagaccatacgaatacacttctcgacaatgtgaaacgatgtttaagggaatctgttacgtttactgacttctttgaactgctgattgcggatttgttccaagaagagggcttagttttattaaattctggagatccggggattaaaaagctggaaacggccatgttccaaaagattcttcgagaaaatgatgaactcgcccgcgctgtatcagatcagcaggccttcatgcgtcaagcaggctacaaaccgattatcgagtccggaaaagagcaggcgaatctgttttatgaatacgaagaagagcgttttttaattgaaaaagacaacggccgatttgtcatcaaagagcttgatctaggatggacgagggatgaacttcatacacatatggaagaacatccagagcgtttcagcaacaatgttgtaacgagaccgttaatgcaggaatttctcattccgactttagcatttattgcagggcctggggaaatcaattattggggcgagctcaaacaggcttttgcggtgatgggcttcaaaatgcctcctgtcatgccaaggctgaacattacgatacttgagcggcatattgagaaaaaactggctgaacggaatatctcattacaagacgcgattgagcgcggaacggagaatcaaagagagacatacttcgagcgccagattccggaagagtttacggcggtgatggatcaggcgaaaagccaaattgaagcgattcacaaaacggtccggcaggaggcgttaaaggttgatcaaagcatggaacctttactcctgaaaaatgccgcttttattcaggatcagcttcaattcttagagcgcacggtgacgaagcgaattgaagaaaaagaaggctacgtcttgaaggattatgaaagaattcaaaatagcattaagccgcttcttgcgccgcaagaacggatttggaatatcatgtattatttgaacaggtacggtccaaaattcttcacgacattcaagaatctgccattttcttttcaaaatcaacatcaagttgtcaaactttgaaataaagttttaaagaaccctgaatagttcagggtttttttttatgggtaaacagtgtaaaatgaagttgtggagcgaagtggtgaatagtggtgagttaaggagagaaagtggggcaagagatcatgtttatgggtgaatatcagcataccatcgatgcgaaaggccgcatgatcgtacccgctaaattcagagaaggcctaggtgagcaatttgtgctgactagaggacttgaccaatgtctcttcggctaccctatgcacgaatggaaacaaattgaagaaaaactaaaagctcttcctctcacaaagaaagatgcccgtgcgtttacccgtttcttcttttcaggggcgactgaatgcgaactggacaagcaaggcagggtaaatatcgcatcatctctattgaattacgccaaactggaaaaagaatgtgttgttatcggggtttctaatcgaattgaattgtggagtaaagtaatttgggaacaatacacagaagagcaagaagattcatttgctgaaattgctgaaaacatgattgggtttgatatataatgattcttcgtgtataacactctaaaagcaatttcaattcatcctgataaaaggtgggaccaacacaatatgtttcaacacaagacagtacttcttcgtgaaaccgtagacggactcaatattaagccggacggtacatatgtagactgcacactcggcggagctgggcacagtacatacttattgcagcagttatccgagaaggggcgtttaatcgcttttgaccaagatgatacggcattacagcatgctaaagaagtgttgtccgactataaaggacagctcattctgattaaaagcaatttcaggtatttaaaagaatgtttgaatgaacaaggcattacagaagtagacggtattttatttgatttaggggtgtcctctccgcagctggatacaccggagcgcggattcagttaccatcatgacgcaccgttggacatgaggatggaccagtcggctacgcttacggcgaaagaagtcgttaatgagtggcgctatgaggatctcgtccgtattttctttaaatacggagaagagaagttcagtaaacagatcgccagaaaaattgaggaggcaagaatgaagtctcctattcaaactacgggccaactggtcgatctaataaaagacgcgattcccgctccagcgagaaggagcggcggacatcccgctaaacgcgtgtttcaggcaatcagaattgccgtaaacgatgaacttagggtgtttgaagaagctttggagcaggcaattgaggttctgaagccagggggcagggtatcagtcattaccttccactcgctagaagacagaatttgcaaaaccacttttaaagaaaagtcgtcgcttccagaacttcctccgggacttcctgttataccggaagagtttgaaccggagctgaagctcatcacacgaaaaccgattacggcaactcaagaagagcttgaagagaacaaccgggctcgttctgccaagcttcggattgctgaaaaaagaaaataacgaaacgcgaacgcaaaattaaaaggaggtcatcagcctatgagcaatttagcttaccaaccagagaaacagcagcggcatgcgatcagtcctgagaaaaaagtgattgtcaagaaaagggcttccattactctcggagaaaaagtgcttcttgtcctctttgctgcggcggtgctcagcgtatcgcttttgatcgtatcgaaggcgtatgcggcatatcaaaccaatattgaggtgcaaaagcttgaggagcaaatttcatccgaaaataagcaaattggtgacctcgaaaaaagcgttgctgatttaagcaaaccgcagcgcattatggacattgcgaaaaagaacggcttgaatttaaaagataaaaaagtgaaaaacatacaggaatgattcaaatgccaaaaaagaataaatttatgaatagaggagcagcgattctaagtatttgtttcgctctctttttctttgtcatcctggggagaatggcatatattcaaataaccggaaaagcgaacggcgaagtgcttgcgacaaaagcgacagagcagcatgaaaagaaacggaccatcgaagcgagccgcggctcgattttagaccgaaaaggaaaagtcattgcagaggacacagcgacgtataaactgattgcgattctcgataaaaaaatgaccactgatgtcaagcatcctcagcatgttgtaaacaaagaaaaaacggcagaagcattgtctaaagtgataaacttggacaaggccgacatccttgatatcttaaataaggaggatgcaaaacaagtcgagtttggctcagctggccgggatattacgtattcgcaaaagcaaaaaatcgaaaagctgaaactcccgggcatttcatttttacgggatacaaaacgctattatccaaacggtgtttttgcatccaatttaatcggctatgccgaggttgatcaagacacaaatgaaatttccggcgcgatggggttagaaaaagtgctggataagtatttgaaggagcgggacggatatgtgacatatgaaagcgacaaatccggctgggagctcccgaacagcaaaaataaaattacagcgccaaaaaatggtgacaatgtatatttaaccattgaccagaaaattcaaacctttttggaagacagcatgacaaaagtggcgcaaaagtataatccgaaaaaaatcatggccgcagttgtcgatccgaaaacaggcaaagtccttgccatgggacagcgaccaagctttgatccgaacaagcgggatgtgacaaactactataatgatttgatttcatatgcgtatgaacccggatcaacgatgaagatatttacactcgctgctgcgatgcaggaaaacgtgtttaatgcgaacgaaaaatataaatcaggtacgtttgaagttggcggggaacctgtcagggaccataatagaggtataggctgggggccgacaacctatcatgacggcgtccttagatcgtcaaatgttgcatttgcgaaactggcgaaagaaaagctgggatatgaccgtcttaatcaatatttacacaaattcaatttttatcaaaaaacaggtattgatttgccaggagaagtctctagcaaaatcaactttaaatatgaatttgataaggcgtcaaccgcatacggacaagcgtctgcagtcacaccaattcagcagcttcaggccgcaacggcaattgcgaatgacggcaaaatgatgaaaccttatgtgattgaccatatcgttgatcccgataaagataaaaccatctatcaaaataagccagaatcagccggaaccccaatttctgcaagcacagcgaaaaaggtgcgggatatattgggagaagttgttacgtcgaaaatcggaacagggcaagcctataaaatcgaaggatttgatgttgccgggaaaacaggtactgcgcaaatagccggtaaaggcggatatctagacggaacagatgactatatcttttcgtttatgggtatggcaccaaaagatgatcctgagcttttaatttatgttgctgtacagcagccgcaactcaaagcaggacaaagcagttcagatccggtatcagaaatcttcaacccgacaatgaaaaacagcctgcactacctgaacattgaaccaactgaaaaatctgactcagataaggaagaaacaaaagcgcagacaatgcctgatttaacagatcaaacggtagctgctgctcaaaagaaagcaaaagaggagaatctcacaccaattgtcatcggcagtgatgtcgctgtaaaagaacagtatccgaaagcggatgaggaagttctcaccaatcaaaaggtcttcctgaaaacgggcggcaaaatcaaaatgcctgatatgacaggctggtcgagaagagaggttctgcagtacggcgagctcgcgggaattcatattgaagtaaacgggcaaggctacgctgtcagccaaagtgctaagaaagacaaagaaatcaaagacaaaaccgtaatcaaggttaagtttaaaaatcctgattaaaaagaaagcttgcgttatgcaggctttctttttttatgccttcagaggagcatcgttctacctgtccaatttcaggcataaaatgaaacaagcctaaataaggagtgaacggtctcttgcgcgtctcgaatgtaacggttagaaaacgtttattatttgttttgctttttggcgtgatcgtgtttctgatcattgatacaaggctggggtatgttcagtttgtgatgggcgaaaaactgacttcgctggcgaaagattcctggagccggaacttgccgtttgagccggagagaggcgagatactggatcggaatggtgtgaagctcgcaacaaacaaaagtgcgccgaccgtattcgtcgtgccgcgccaagttcagaatccgatgaaaacgagcaagcagcttgcggcggtgctcaatatgtcagaagaaaaagtatataaacatgtgacaaaaaaagcgtcaatcgaaaagatcactcctgaagggagaaaaatttcaaatgagaaggcgaaggaaattaaagcgcttgatttaaaaggtgtgtatgttgcggaggacagtatccgtcattacccgttcggcagctttttatctcatgtgcttggatttgcaggaattgacaaccaaggactccttggattggaagcctattacgacgatgatttaaaaggggaaaaaggttctgtcaagttttatacagatgccaagggtaaaaaaatgcctgatgaagcggatgactatacgccgcctaaggatgggcttgatatgaagctgacggttgattcaaaggttcagacgataatggaaagagagcttgataacgctgaggccaaatatcatccggacggcatgattgccgtagccatgaatccgaaaaacggagaaattttggggatgtctagcaggcctgacttcgaccctgctgattaccaatctgttgatccgtccgtctacaaccgaaatctgccagtatggagcacgtatgaaccgggatctacctttaaaattattacacttgcagcagcccttgaagagcaaaaagtaaatttgaaacgggatcaattttatgataaagggcatgcggaagtggacggagcgagactgcggtgctggaaaagaggcgggcacgggctgcagacgtatctggaagttgtgcagaactcctgcaacccggggtttgttgaattaggcgagcgcttaggaaaggaaaagcttttcaaatatatcaaagactttggttttggacaaaaaacggggattgatctccaaggcgagggaacaggcatcttattcccgcttgagagagtaggcccggtggagcaagcaactacggctttcggacagggagtatccgtcacgccgattcagcaggttgcagcagtctccgccgctgtaaacggaggaacgctctacacaccttatattgcaaaggaatggatcgatcctgttacgaagaaaacggtcaaaaaacaatcaccaatcgcaaagaaacaagtcatttctgaggaaacatccaaacaaatccgctatgctctagaaagcgtcgtcgcagaaggaaccggccgcaatgcatttgtagaaggatatcgtgtcggaggaaaaacgggaactgcacaaaaggttaaagatggaaaataccttgaaaacaaccatattgtatcatttatcggtttcgcgccagctgatgatccgagtctagtcgtctacgttgcggtggataacccgaaaggcacgattcaatttgggggaacggttgcagcgcctattgtcggaaatattatgagagacagtctgccggaacttggtgtgaagccccggaaaaatcaaatcgagaaaaaataccaatggaacgacacaaaaacaatagaagttccgaatgttgtagggatgtctgtctcagatcttgagtcactattggtgaatctcaatgtggatgcttccgggaaagggagcaaaatcgttaaacaatcgccagctgccggaacgaaagtaaaagaaggctcaaagatacgcgtgtatttgactgaagaagatgaaaaggaggcagccgattgattcgggctgcctattcttttattgcagaaaaaatgctgatatctttcaagattagctggatgtatccttttatttacgctaaaatatgaactgtatgcttaaaatcattaccacatcatttgatgtgacttcaatgataaaaagaacgaattagaatgttgagaggtttgatacgatgaaacttacaaagctgcttacatacttaacaaccgaaccttctgtaaacgactcacaagaccctgaaataacttcaattgagatggactccagggaagtaaagaaagggagtctttttgtatgtgtaaaagggtatacggtggatggccacgattttgcgcaaaaagcagtagaaaacggtgcagcggctattgtggcagaaagagaggtcgatgtgaatgttcctgttattattgtccggcagtcacttcgcgcgctcagcgttttgtctgatgcgttttacggacagccgacgaagaagcttcagctgattgggataacagggacaaacggcaaaacatcaacgacccacatggtcgatgagattctgaaaaaagcgggaaaacgcacaggcttgatcggtacaatgtacatgaaaatcggagacgaaacacttcctgttaaaaacacgactccggaaagcgtcacgctgcagaaaacgtttaagaaaatgaatgacaagcatgttgacactgcaatcatggaggtttcttcccacgctttgtctttaggacgcgtccatggctgtgattatgatattgccgtgtttacgaatttaacacaggaccatctggactatcataaaacgatggatgagtaccggcatgcaaaaagcttgctcttttcccagcttggcggggctttcaaccatgaacatccaaagcgtgccgtcctgaatgctgacgatgaggcgagcgcttattttgaaaaggtaacagctgcgcatatctctacatacggaattaaaaacgatgctgatgtgatggcgaagaacatcagtatcactgcacagggcacaagctttgatctcgtgacaaacaaaggcacgaagcacatcacgatgtctctcgtcggacaatttaatgtgtataacgtgctggccgctgttgcgacatgtattgcagcaggcataccgtttgaaatcatcactgaagctgttgaagaattgcatggtgtaagaggccgttttgaattggtcaatcagcagcaggagtttccagtcattgtagactacgcgcacacaccggacagccttgaaaatgtgctggagacatgcagagacatgacggaaggaaagctatttgtcgttgtcggctgcggaggagacagagataagacgaagcgcccgaaaatggctaaaattgctgtggagctggctgacgagccgattttcacgtcagataacccgagaagcgaagatcctcgcgcgattttaagagatatggaagccggagtagagaacgcatactatcacagtattgcaaaccgcgagcaggcgatctttttcgcaattgccaatgccaaaaaaggcgacgttgtcctcattgcgggaaaaggacatgaaacctatcagcagatcggaaatgaaactttcgattttgatgatgctgaagtagcggcgagagccattgttgaactcaataagaataagacgaattcataggaaagagatgttactgaataatggagcttgaaaagatttttcatatggaaaaaaatcatgaatatgataactacgtatgtcgtttgaaagaaacaggaggagaaaaggacaatgcttgagcaagtcattctgtttacaattttaatggggtttttaattagtgttctgctctctccgattcttattccgtttttaagaagattaaaattcggccagagtattagagaagaaggaccgaaatcacatcagaaaaaatcagggacaccgacaatgggcggggtcatgatcatactttctatcatagtgacaacaattgttatgacacagaagttttcagaaataagccccgaaatggtgctgcttctgtttgttacgctaggctacggtttgcttggctttttagatgattacatcaaggttgtcatgaagcgcaatcttggattgacatcaaagcaaaagctgatcggacaaattattattgcagttgtattttacgccgtgtatcattactacaattttgcgacggatattcgcattcctggaactgacttatcatttgatcttggctgggcttactttatccttgtgctctttatgcttgtcggcggatcaaacgcagttaacctgactgacggccttgacgggttattgtccggtactgcggcgattgcctttggcgcctttgccattctggcatggaatcagtctcaatatgacgtagcgattttctcagttgccgttgtcggtgcagttctgggcttccttgtatttaatgctcatccggccaaagtttttatgggagatacgggatcgcttgcattgggaggagccatcgttaccattgccattttaacgaaattagagatcctgctggttatcatcggcggtgtattcgttatcgagacattatctgttattttgcaggtcatcagctttaaaacgacaggtaaacgaatctttaaaatgagtccgcttcatcaccattatgagcttgtcggctggtctgaatggagagtagtcgtgacgttttgggctgcgggacttttgcttgccgttttaggaatttacatcgaggtgtggttataagtggaaaatgatcaatttttacagaaacagcattttttaatccttgggcttgcgaaaagcggatatgcggcggcctccattcttcatgaaaaaggcatttatgttgcagtcaatgaccaaaagccttttgaagaaaatgaaccggcacaaaagctttctgaaaaaggaatcgaagttgtttgcggagagcatccagtttctctgttcgatcagcatcaaatcacgattctgatcaaaaacccgggaattccttatgaaaatattatggttcaggaagcggagaaacgaggcattccggtttggacggaaattgagctcgcttactacctgaccagcgccaagtttatcgggattaccggatcgaacggtaaaacgaccacgacaacgctaatttacgaaatgctcaaagctgactcgcaaaaagcactgattgccggaaacatcggcacagtcgcaagtgaggttgcctatcatgctgatggagatgaatggatcgttaccgaactgtcttcgtttcagctgatgggaacacacgctttcagaccggaaatcagcctgattttaaatgtatttgacgcccatctggattatcaccatacgcgcgaaaactatgaaaaagcgaaacagaaagtgtaccttcatcagactgcttcagataaagccattgtcaaccaggatgatgaaaccgtcgtgcgtcttgctgaagccggaaaagccgaaatcgtcccgttttcagtcagcaaaacgcttgaacagggcgcatatgtaaaagacagtatgattatgtttaacggcgaagccattcttcctctggaagaggttgtactgcccggtgctcataacctggagaacattttagcagctattgcagttgtgaaaacggcaggagcatccaatgaggcggttaaaaaggtgctgacaagctttactggtgtgaagcaccgcctccaatatgtcacaactgtgaatggccgcaaattttataacgacagtaaagcaacaaacattctggcgacaagcaaggcgctttcagcttttgacaagccggtcattctgcttgcgggcggactggatcgcggaaatggttttgatgacttgaaaccttatatgaagcatgtcaaagcagtgcttacatttggccagacggcgccaaaactcgagaaactcggcaatgaactgggaatacaacatgtcaaacgtgtcgataatgttgaacaagcagtatctgcggcgtttgcgctctcaaatgaaggagatgtcatcctgctgtcacccgcgtgtgcgagctgggatcaattcaaaacatttgaagaacgcggtgacatgtttatagatgccgtgcatatgcttaagtaagggcttgtcttgaagtaaatcggcagccctaatgactttaagcttggggtgtcgattgctttgactactaaaaaaacatcgcctgatttgttattggtcatcattacgttattattattaacaatcggattaattatggtgtacagtgcgagtgcggtatgggcggattataaatttgacgactcattctttttcgcgaaacggcagcttttgtttgcgggaatcggcgtcattgctatgttttttatcatgaatgtcgattattggacttggaggacatggtccaaattgctgatggttatctgctttttccttctggtgcttgttttgataccgggcgtcggaatggtgcggaacggttcaagaagctggatcggagtcggagcattcagcatacagccttcagagtttatgaagcttgcgatgattgcattccttgctaaatttctctctgaaaaacaaaaaaacatcacatcgttcagacgggggttcgtccctgcacttggcatcgtgttttcagcatttttgattatcatgtgccagcctgacctcggaacggggacagtaatggtcggaacttgtattgtcatgatttttgtagccggcgcgcggatcgcccatttcgtctttctcggactgatcggcctcagcggatttgtcgggctcgtactatcagctccatatcggattaagcggattacctcatacttaaatccatgggaagacccgctcggaagcggatttcagatcattcaatcgctttatgcagtggggcccggtgggttgttcggaatggggctcggacaaagcagacagaagttcttttatctgcctgagccgcaaacagactttattttcgccatcttgtcagaggagctgggctttatcgggggaacacttattttgctcctcttcagtgtcctgctgtggagaggaatcagaattgcgcttggtgcgcctgatctgtacggaagctttgtcgcagtcggcattatttcaatgattgccattcaagtcatgatcaatatcggcgtagtcacgggcctgattcctgtaacaggcatcacgctcccgtttctgagctacggaggctcttcattgactctaatgctgatggcagttggtgtgctgctgaatgtaagccgctactcgaggtattaacgaatgtatgtccatgcttcctgtctaacatgaagcttggaaacaattgatgcgataaccctgtccaacaaaacagggttatcgttatgttatagagaaacttagactgggggaaaagaaatgcgaattgcaataagcggaggcggtacagggggacatatttatcctgcgcttgcttttattaaagaagtgcaaagacgtcatcctaatgtggaatttttatatatcggaacagaaaacgggctggagaaaaaaattgttgagcgggagaatataccgtttcgttcaattgaaattacaggatttaaaagaaaattgtcatttgaaaatgtcaagactgtgatgcgttttctgaagggcgtcaaaaagagtaaatcgtatttagcggaatttaagcccgatgccgtaattggaacgggcggttatgtatgcgggccggttgtctatgccgctgcgaaaatgggaattccgactattgtccatgaacaaaacagcctgccgggcatcacgaataagtttctttcaaaatatgttaataaagtagcgatttgttttgaagaagcgaaatcacattttcctagcgagaaagttgtatttacgggaaacccgagagcctctgaagtcgtctcaataaagacgggacgatcaatggctgaatttgggctttctgaagacaaaaaaacggtcttaattttcggcggaagccgaggcgctgcaccgattaaccgcgctgtcattgacatgcaggatgcgctgaaaacaagagactatcaagtgctgtatatcaccggtgaagttcactatgaaaaagtaatgaatgagctgaaaagcaagggtgccgctgataatatggtcacaaagccgtttcttcatcaaatgcctgagtatttaaaggccattgatgtcattgtggccagagccggtgcgacaacgattgccgaaattactgctctcggaatcccaagtgttctgatcccaagtccatatgtgacagcgaatcaccaggaggtcaatgcgagatctcttggccagcataatgcggcgattgtactgaaagaaacagagctcagcggggagaagctgattgaagcgctagaccggattgtactgaatgagcaaacgttaaaggaaatgagcgaacgaacaaagtcactcggtgttcctgacgcggctgcccgtttatacagcgtactcgaggaattaaaaaaatagtagaaaagcaaatggaatgcggaggtttacgatggagaaagtgatacaggaattaaaagaacgcgaagtcggcaaggttcttgcaaatgaaccgctcgcgaatcatacaacgatgaaaatcggcggacctgcggatgtattggtcattccaagcagtatagatgctgttaaagacatcatggacgtgattaaaaaatatgatgtgaagtggacagtcatcggccgcggatcaaatcttcttgttttagatgaaggaattagaggcgtagtgatcaagctgggggcgggtcttgaccatttggagcttgaaggggaacaagtaacagtcggaggcggttattcagtggtccgccttgctacatcattgagcaaaaaaggcctgtccggtttggaatttgctgccggcattccaggatcagtcggcggagcggtttatatgaatgccggcgctcacggttctgatatgagcgagatcctcgtcaaagcgcatattttgtttgaagacggaacgattgagtggctgacaaatgagcagatggatttcagctacaggacatctgtactgcaaaagaaacgcccgggcgtttgccttgaagctgttttgcagctggagcagaaggataaggaatcaatcgttcagcaaatgcaaagcaataaagactatagaaaaaatacacagccgtattcaagcccttgtgcgggaagcatattcagaaatccgcttccgaatcatgccgggaaccttgtagaaaaagcaggcttgaaaggatatcaaatcggcggtgcaaagatatcggagatgcacggaaacttcatcgtcaatgcgggaggagcatcagcaaaagatgtgcttgatctcattgaccatgtgaaaaagacaatccgtgaaaaatacgagattgatatgcacacagaggttgaaatcatcggcggaaatcgctgattcaagttctgactgaagctgttcatatgatatactgtaagcaaacgacaaacggcatcatagtatgccgtttgttttggaatagacagacttttaacagctgtttcatttgaatgaggtgaacaggcaatgaacccgggtcaagaccgagaaaaaatcgttaacattgaagagcggatccctaaaattaaagagcagaggaaacaaaaggcaaaccgccgtctcatttcatttattatgctcttttttattatggtgctgatcattgtgtacctgcaaacaccaatcagtaaagtatcaacaatctctgttacagggaatgaaaatgtatcaaaaaaggaaattatcgacctttccgatattaacagcggagatactgagttttggagtttggacaagcaaaaaacagaaaagaagattcagcaaaataaattagtgaaaaaagcggagatcagcaaatcgcttcctaataaaatcaacattgcaatcgaagaatataaagcgattgcttatttagaaaaagacgatgtgtactatgaagtgcttgaaaacggctcagttctgccaaacgaagtaacgccggatgatgccggaccgattttagtgaattggacaaacgcgaagaagcggtctcaaatggccaagcagctcgatgcgttgtcaaattcgttaaaacagtcgatttcagagatttattatacgcctgtaaaaatggatgaaaaccgtattaagttgtacatgaacgacggttatgttgtcactgcatctattaaaacgtttgcagaccgaatgaagacgtatccttctatcatttctcagctaagcagcaataaaaaaggaatcattcatttagaagttgccacctattttgaagagtttgggaaaaacgataaggctgctaaaaaggaagatgaaaattgaggggcaaatcagcagtccttctttccttgattatgcttatcgcaggctttttgatttcattttcttttcaaatgacaaaagaaaacaacaaaagcgcggctgagacggaagagtggaaaaaagaatatgcgctgagagatgaacttctgaaacaagagaaagaaaataagaagcttgaaaaagaattatatcaaaagcaaaacaaagtccgccaggcggaaaataagctgaagaaagagaagtcggaatactataatgtcctcgaagatacagaaaaatacaggatgtatattggggaagtcggtgtgcagggagaaggcgttgaggtgacattggaagatgcgtcatacataccggaaggggagaatgtgaatagttacatcgttcacgaaagccatatcttccaagtagtaaacgaaatgtatatctcaggagcggcagctgtcgccgttaatggacagcgtttgacgcatgattcgtatatcaaatgcaatggtcctgtggtaacggtagacggggtgcagcatcccgctccatttacggtatccgctattggagatccagatgtcctgctgccctcgttaaatatcgctggaggcctaattgatcagctgtcaatggatcatatttctgtgtcggcagaaaaagagaaaaacgtacaaatgaaaccgattctgaaaacgaaggaatgactgaaaaagcgggtgaaatagattgaaaataaagcgttccttcataagcatcagtgtgcttatggtcatcttcggcctgatgatatctgttcagtttaattcgttaaagcaccccaaagtccgggatacaagagatatgtgggatattagggaagagctgacatcagagcagaagaagcaggaaaagctgctgtctgaaataaacaaatatgacaaacttctgaatagctattcgcaaacgaaagaaatgacaaaagaaaccgcgctaaataataccttgcaatccttaaaaaaaacagccggcatgaccgatataacaggtagcggaattgtcattacgatttccccgcttttttctgaaagcttaacaggagagccggtcgaaaatccgcctccggatttgctgaaaaagctgattaatgaactcaactcctacggtgcagagcatatctcgattaacgagcgaagagttgtgaatcatacagttatcagagatataaacggcactacaaaaatagacggatacgcccttgacgattatcctttaacagtaaaagtgcttgccaaagatccggacatgttacacagcggagtgaaggggtcaggccttgaggatctttttgcatctgaaaatttagcattaaaagccggtaaatctgaaagcaaactaacattaaaagcatatgacagaccactggacgtacaacagctgaaactgcttaaagactgaaaaggaggagaattgtcatgtggctgcccgtgttgggactggtgctcggaatagcgattggactaatgacaaacttaacgataccgagtgaatactcaaactatttatcgcttgcggtgcttgccgcacttgatacattaatcggcggaatcagagcgcatttacaaggtacatatgatgaaatggtatttgtttccggtttcttttttaatattatattggcaataagtttagcttttctgggagtccatcttggtgtagacttgtatttagcaggtatattcgcatttggagtcagattatttcagaatatagccgttatcagaagaaatctactaacaaagtggactctttctaaaaaaaataaaaaaaatgtgatataaaagaggatatacataggatataacgaatattttcaataaacataaaatgtgaaaagcacataaaaatattctgttgttattttttgttacacacttgtaaagccacattcattgtattgttgttccgcaaataatagaatagaaatgatcgaaatgtgaggaggtgccatagaatgaacaacaatgaactttacgtcagtcttgacatcggtacgtccaatacaaaagtgatcgtcggagaaatgacagatgattcccttaatattatcggtgtgggaaatgtaccgtctgaagggttgaaaaaaggctcaatcgttgatatagatgagaccgttcattctataagaaaagcgtttgaccaagctgaaagaatggtaggttttccgcttagaaaagctattgtcggcgttaatggaaattatatcaatattcaagatacaaacggtgttgtagcagtttccagtgaaaataaagaaattcaggttgaagatgtacgccgtgtcatggaggcggcacaggttgtttcagtaccgcacgaacagctgattgttgacgtcattcctaaacagtttatcgtagatggaagagatgaaatcaccgacccgaaaaaaatgctgggtgtgcgtttagaagtagagggcaccttgatcaccggttcaaaaacaatcttacataacttactccgctgcgttgaaagagctggtattgaaataactgatatttgccttcagccgctggcagccggttctgctgcattatcaaaggacgagaaaaaccttggtgtggctctcattgatatagggggagggtcaacaaccattgccgtattccagaacggacatctcacttctacccgtgtcattcctctcggaggcgaaaatatcaccaaagatatctccatcggattgagaacgtcaacagaagaagcagaacgcgtgaaaaagcaatttggacatgcctactatgacgaagcctcggaagatgaaatatttgaggtaaccgttataggcaccaatcaaaaacaaacatttacacagcaagaagcagcgaatatcattgaagcgagagtagaagaaattcttgaaattgtttcagaagagcttcgcagtatgggaattaccgatctgccgggaggcttcgtgctgacaggaggacaagcagctatgccgggtgtcatgtctttggcgcaggatgtgctgcaaaacaatgtcagagtggcaagcccgaattatatcggtgtaagagatcctcaatatatgacgggagtgggcctgatccaattcgcctgccggaatgcaagaatccaaggcagaaaaataggctttaagatgcctgaagaagcgatacaggaaatcgcagtctcatcatctgaggaacaagagcagcatcatcaccaaaatgaggtgcagcagcggccaaaaggaaaacaaaaaacacaagccgaacataataaacagagcaaaatgaaaaaactattaagcatgttttgggaatagatagatagtcattcggcagattaggaggatttagcatgttggagttcgaaacaaacatagacggcttagcatcaattaaagtaatcggagtaggaggcggtggtaacaacgccgttaaccgaatgattgaaaatgaagtgcaaggagtagagtatatcgcggtaaacacggacgctcaagctcttaacctgtcaaaagcagaagtgaaaatgcaaatcggcgcaaagctgactagaggattgggagcaggtgcgaatccggaagttgggaaaaaagccgctgaagaaagcaaagagcagattgaagaagcacttaaaggtgctgacatggtattcgtgacagctggtatgggcggcggaacaggaacaggtgccgcaccggttatcgcacaaatcgcgaaagacttaggcgcattaactgtcggcgttgtgacaagaccgtttaccttcgaaggacgcaaaagacagcttcaggctgcaggcggaatctcggcaatgaaagaagcggtggatacactgatcgtgatcccgaacgaccgtatccttgaaattgttgataaaaacacaccgatgcttgaagcattccgtgaagcggataacgtacttcgccaaggggttcaaggtatttctgacttgattgctacacctggtcttatcaaccttgactttgctgatgtgaaaacaatcatgtcaaacaaaggatctgctttgatgggtatcggtattgctactggggaaaatcgcgcggcagaggcagcaaaaaaagcaatttccagcccgcttcttgaagcggccattgacggtgcgcaaggtgtcctcatgaacatcactgggggaactaacctcagcctatatgaggttcaggaagcagcagacattgtcgcttcggcatctgatcaagacgtaaacatgattttcggttctgttattaatgaaaatctaaaagatgagattgtggtgacagtgattgcaaccggctttatcgaacaagagaaggacgtgacgaagcctcagcgtccaagcttaaatcaaagcatcaaaacacacaaccaaagtgttccgaagcgtgagccaaaacgtgaggagcctcagcagcagaatacagtaagccgtcatacttcacagccggctgatgatacgcttgacatcccgacattcttaagaaaccgtaataaacgcggctaatgtaaaggacaaaatcgttttcgattttgtccttttttgtttttctcttcacactttccttcttataaagtctttttccctattgcttccttcgcttagtaacaaaacagataattagacctatttatttttgtgacatttctatcattttcatatatatggaaattgaatgacatgaaacgacaatatctgtaattcagattgtctacagttaatatacagcgatgttctgacaaaccattcattattaaaaggagggacgacactttttttaaaaagcatgttgaaaaagggggatgaaaatgaagaaaaaaacgaaaaacagactcatcagctctgttttaagtacagttgtcatcagttcactgctgtttccgggagcagccggggcaagcagtaaagtcacctcaccttctgttaaaaaggagcttcaatctgcggaatccattcaaaacaagatttcgagttcattaaagaaaagctttaaaaagaaagaaaaaacgacttttctgattaaatttaaagatcaggctaacacagaaaaagcggcaaaagcggctgttaaaaaagcgaaatcgaagaagctgtctgccgctaagacggaatatcaaaagcgttctgctgttgtgtcatctttaaaagtcacagccgatgaatcccagcaagatgtcctaaaatatttgaacgcccagaaagataaaggaaatgcagaccaaattcattcttattatgtggtgaacgggattgctgttcatgcctcaaaagaggttatggaaaaagtggcgcagtttcccgaagtggaaaaggtgcttcctaatgagaaacggcagctttttaagtcatcctccccatttaatatgaaaaaagcacagaaagctattaaagcaactgacggtgtggaatggaatgtagaccaaatcgatgctccaaaagcttgggcacttggatatgatggaactggcacggttgttgcgtccattgataccggggtggaatggaatcatccggcattaaaagagaaatatcgcggatataatccggaaaatcctaatgagcctgaaaatgaaatgaactggtatgatgccgtagcaggcgaggcaagcccttatgatgatttggctcatggaacccatgtgacaggcacgatggtgggctctgaacctgatggaacaaatcaaatcggtgtagcgcctggcgcaaaatggattgctgttaaagcgttctctgaagatggcggcactgatgctgacattttggaagctggtgaatgggttttagcaccaaaggacgcggaaggaaatccccacccggaaatggctcctgatgttgtcaataactcatggggagggggctctggacttgatgaatggtacagagacatggtcaacgcctggcgtgcggccgatattttccctgagttttcagcggggaatacggatctctttattcccggcgggcctggttctatcgcaaatccggcaaactatccagaatcgtttgcaactggagcgactgatatcaataaaaagctcgctgacttttctcttcaagggccatctccatatgatgagataaagccggaaatatctgcaccgggcgttaatattcgttcatccgttcccggtcagacatatgaggatggttgggacggcacatcaatggcagggccgcatgtatccgctgttgctgcactgctgaaacaggcgaatgcctcactttctgttgatgagatggaggatatattaaccagcacggctgaaccgctcacggattcaacatttcctgattcaccgaataacggatatggccatggtctggtgaatgcttttgatgctgtatccgctgttacagatggtttagggaaagcggaaggacaagtttctgtagagggggatgaccaagagcctcctgtctatcagcatgagaaagtaactgaagcttatgaaggtggtagcctgccactgactttgacagctgaagacaatgtgagtgtgacatctgtaaagctgtcctacaagcttgatcaaggtgaatggacagaaataacggctaaacgaatcagcggtgatcatctaaaaggaacgtatcaggcagagatcccagatataaaaggaactaaactaagctataagtggatgattcacgattttggcggtcatgtcgtttcgtctgacgtatacgatgtaacagtgaaaccaagcatcacggcgggatataagcaggactttgaaactgcacccggcggctgggttgcgagcggaacaaataataactgggaatggggagttccgtcaactggcccaaatacagcagcatccggagaaaaagtatatggaacgaatttgacaggaaattatgccaactcagcaaacatgaaccttgttatgcctcctattaaagcacctgattcaggaagtctgttccttcaatttaaaagctggcacaatttagaggatgattttgattacggctacgtttttgttcttccggaaggtgaaaagaattgggagcaggctggtgtctataacggaaagacatcaagctggacggacgaagaaattgatttatcggcttataaaggccaaaacattcaagtgatgtttaaccttcaatctgatgaaagcattgcaaaagagggctggtatattgatgatgtagtgctttctgacaaatcagccggaaaaacagtcaaaaagaataagctgggcgtcgaaaagccgtctggaaagcaaaagaaaaagccagtaaatccgaaaaaggctaagccatctgcaaacacagcggtaaaacatcagaacaaggctatacagcctcaagttttgccgctcagggcacaagtcagtgtagtggaaacaggaaaatcaacatattcagatcaatccacagggcagtacacgctgaagcacaaagcgggagactatacgcttatggcagaagcatatggttatcagtcgaaaacacaaaaagtatctttaaagacggatcagacgacacaagctaattttacgttagaagagatgaagaagggcacattaaaaggcatggtcatcaataaaacgacaggagagccggtaacaggcgcttccgtttatgttgtagaggatgctgctgtggaaccggctatgacaaacgacaaaggtgaatatacgctggaggcctatgaaggcgcttatacgattaaagtcgctgcaccgggttattacagtgatgaattttccgttgagttaaaaggtgatgttacaaaagaaactgcattgaagcctttcgtcggttatccgggtgaaattgcatatgatgacggaacagcggagaatgccaattcctattttgctgccggtaacggatgggcggtaaaaatgacgctcgctgacggcaaggacaaaggcatgcttacaggagggctgttcagattctgggatacagagttcccagatccgggcggcacagagtttaaggttgaggtatacgatgccacaggaaaagacggagcaccgggcaagaaaattgcagggccatttaacgctgaagctcttcgcaatggcgagtggactaaggtagatctcagttcaaaagggattatggtcgatagagacttttatctcgtatatatccagtcaaaacctgacccgtattcacctggactggcaatggatgaaaccggcaagaattccggccgcaactggcagtatataggtggacaatgggagccgggtgacgaagcagacggcaactatatgattcgcgcattagttaattatgaagctgctgtacctgagattacttcaccgacagacaaatcatacacaaataaggatagcgtcactgtaaaaggaaacgcttctcctggcacaacggtacacatttataatggagagaaagaagcaggagaaacgaaagctgctgcggatggcacgttccatgcaggcatcatactcaacaagggtgaaaatgagctgacggcaactgcatcaactgacaacggaacaacagatgcctccagcccaatcacggtcacgcttgatcaagaaaagcctgaattaacactggacaatccaaaggatggcgggaaaacaaataaagaaacgctgactgtcaaaggggctgtatccgatgacaatctgaaagacgtcaaggtgaatggcaaaaaagcaacagtagctgatggttcatactcagcccgtattcttttggaaaatggaagaaatgaaatcaaggtaattgctacagacttggcaggcaacaaaacgacgaaaaagacagtcattgatgtgaactttgacaagcctgtcatttccggcttaattccgggagaggataaaaacttaaaagccggtgaatctgtgaaaatcgctttctcaagcgctgaggatttagatgcaacgtttaccattcgtatgccgctgacgaatgcaagagcgagtgtgcaaaatgccaccgaactcccgttaagagaaatctctccggggagatatgaaggctattggactgccacttcttctattaaagcaaaaggagcaaaagtagaagtgatcgtccgagatgattatggaaatgaaacaagaaaaactgcgaatggaaaacttaatatcaacacagaaaattaagtggaaaaaagctgccgtcattggcagtttttttatatcctctcattatacttcctcgacaaattaagcagatttccctgaaaaattgtattttcctctcaacattaattgacagactttcccacagagcttgctttatacttatgaagcaagaaggggaacagcgtgaggcaagaaagaaaggagtcagatgtgaaaatctatttagatgtcatttggctgttaaacttttgttttgatgcacttttgcttttgctcacggcatttattttaaaacggcatgtaaaaaaaagaagactggtaggcggagcgttcatcggttccagtattgtccttttgatgtttactcctttttcgccgattgttgaacatccggctgggaagctagctttttcagttgtgattgtggtggtgacatttggctttaaaagatttcggtttttctttcaaaatttgttttccttttattttgccacttttttaatggggggaggaattatcggagcccattctttgctgcagtcaaattctattgttcaaaacggtgttatgattaccaatcaaacagggtttggagacccgatcagctggttgtttattgttggtggctttccagcattatggtttttttctaaaagaagaattgaagatattgaaacaaaaaacattcaatatgaggaacgagtcagcgtgcaggcagatttgggcagccaaacacttcatgtcagaggcctgattgattccggtaatcagctgtacgatcctcttacaaaaacaccggtaatgatcatttacattgataaattggagccgattttcggaacagccgaaacgatgatcattcgaaacacagacccattggaagccatcgaacagctcgatgattcctttcgctttttagataaaatgaggttgattccatacaggggagttggtcagcaaaatcaatttttattatgcgttaaaccggatcacgtaacgattatgacaaaagaagaaatgatttctgcagataaatgtttaatcggcatcagcacaacaaagctgtcggcagatggagagtttgacgcgattattcatccgaaaatgctttcgggcaaggctgtcaaacacgtttcataatgttcgcaaatgtccgttacttatcatactcaaacggcgtgacatttagaagggagaggaagatgaaaaaactgaaattacggttgacgcacctctggtataagctgctgatgaaacttgggctgaaaagtgatgaagtctattacataggcgggagtgaagccctgccgcctccattatctaaagatgaggagcaggttttgttaatgaagctcccaaacggcgatcaggcggcgcgcgccattctaattgaacgcaatttgcgtctggtcgtatatatcgcccgtaaatttgaaaatacgggaattaatatagaggatttaatcagcatcggtaccatcggtctaatcaaagctgtgaatacattcaatccagaaaagaaaatcaagcttgctacctatgcctcccggtgtatagaaaatgaaatcctgatgtatttaagaagaaataacaaaatccgttcagaggtttcctttgatgaaccgcttaatattgattgggacggcaatgagcttttgctttctgatgtgctcggcactgacgatgacatcatcactaaagacatagaagctaacgtcgataaaaagcttttgaaaaaggcgcttgaacagcttaatgagagagaaaagcaaatcatggagctgcggtttgggcttgtcggtgaagaagaaaaaacccaaaaggatgtagcggatatgatggggatttctcagtcttatatttcgcggcttgagaaaagaattataaaaagattgagaaaagagttcaacaaaatggtgtaaaaaattttatggttagaaccccttgattttacagggatttcctgatttcgacagtttttcggtctgagtgcagtgcatatttttcccacccaaggagatacttaacgttgtacagcagctcctgtagggagggaaaaaagtgtcgagaaataaagtcgaaatctgcggggtggatacctccaaattaccagtactcaagaatgaagagatgagaaagctgtttaggcagctgcaggatgaaggcgatgattcagcaagagaaaagcttgtaaacgggaacttgcgtcttgtcttaagtgtcattcaacgatttaataacagaggggagtatgttgatgacttatttcaagtcggctgcatcggactaatgaaatccattgataattttgacctaagccacaatgttaagttttcaacatacgctgtacctatgattatcggagagatccgcaggtatttacgcgataataacccgatccgtgtctcaagatcactccgggacatcgcttacaaggcgcttcaggtaagagagcggttaatcagtgagacaagcaaggagccgactgcagaagacatcgcaaaagttcttgaagtaccgcatgaggaaattgtatttgcgcttgatgccatccaggatccggtttctctatttgaaccgatctataacgacggcggagacccgatctatgtgatggaccaaatcagtgatgagcgtaatacagattcacaatggattgaagagctggctttaaaagagggcatgagaaggctgaacgatagggaaaaaatgattttgagaaagcgattcttccaagggaaaacccaaatggaagtcgccgaggaaatcggaatttctcaagcgcaggtgtccagacttgaaaaagcggctatcaaacaaatgaataaaaatattcatcaataatgaaaagcctttaaaacgatgttgttttaaaggcttttctattgattatggatggtttacgttttggaaaaagtaaggtatcctagttcgtacaaagttttatgaaaattaaaacaattataaaaggcaataaagaggaggaccacgatgattttgcagcttgacaatgtctcactaaaacggaatgggaaatggatactgagagatattgattggaaggtggaagaaaaggaaaattgggtgctttacggcctaaatggcgccgggaagacagcgctgttaaatatgctttgctcatattattttccaacatcaggcgagatgcaggtgcttggccatgaatttggcaaaacagagcttggggaaaagctcagacgtaaaattggcctcgtctcagctgctcttcagcaaaaattgtacccggcagattcagcctttgaaattactttgagcggagcttacgcttcgattggtttatatgaaacgccaagtaaggaaaccagggaaaaagcgattggtttgttagaggacttgggagcaattgaatatgccgatcgccgctatgaaaccctttctcaaggggaaaaacaaagagcgttgattgctagagcactaatggccgatccggagttgctgatactggatgaaccagtcacagggctggattttattgcccgggaaaagctgttagatacgattacatacattgcaaacaaagaaaatgcaccatctatcctttatgtgactcatcatgctgaagaaattttgcctgtctttgataaagcccttttattaaaacagggagaggtctttggatccggagaaataaaggaaatgcttactgatcaaatactttccgctttttttgataccccaatccatgtattatggaatcaggatcggccgtttttaacaagagctgagccgataacgaatgcctgacaaacatatatagattcatcctaggggtgctttgcgaagctgagagagactttgtctcaacccttttgacctgatctggatcatgccagcggagggaagcggtgaaaagcggagtacatcggactccgtttgtttttattaagccgtttcatcacatttgaaacggcttttttgattttaaagaataggagcggatttacattggatcaacaaatagactctttgcaaaaaaaagtggaagaacataaggaggagcttattcagcttgcgaaaacgctgatttcttatcaaacacctgctccgcctgcaagaaatacagagggcattcagtcatggattgcgggatatttaaatgaattgggattctcgatcgacaaatgggatgtgtaccctggagatcccaatgttgtagggaagctaaaaggaacagattcagcagattattatagcctgattatcaatggccatgtagatgtggcagaggtaaaagaggatgaagaatgggagcatgatccatttcatccaattgaaaaaaacggtctcttaatcggtcgaggcgcttccgatatgaagggcggaatggcgtgtgtgttgtttgctgtcaaattaattcgtgaagccggcattgagcttccaggtgatctgattctgcaatcggttattggggaggaagttggagaggccggcacacttgaatgctgcaagaggggctaccacgctgattttgcaattgtcgcggatacgagcgatatgcatattcaaggccaaggcggtgtcattacaggctggatcgaaatcaaaagcagtcaaacatttcatgatggaacgagacggaatatgattcacgcaggcggaggaacattcggagcaagcgcaattgaaaaaatggcgaaaatcattgcggggctcggtgaacttgagcgccactggtccattatgaaaagttatcccggttttaaaccaggcacaaatacgattaatccggcagttatagaaggcggcagacatgcggcttttatagcggacgaatgccggctgtggatcacagtccatttttatccaaatgaaacccatgaccaagtggcagcggaaatagaagattacgtcaatcggctgagtgacagtgatatttggcttagggaaaaccgccctgtattcaagtggggaggctcatctatgatagaagacagaggagaaatttttccggcattggaagttgactctggccacccaggcgtcttagcgctaactgcctctcatcagaaagtgaaacgggagtgtccaattattgacgtttctcaatcagttacagatggcggatggctgtatgatgccggtattccatgcgtaatatacggtcctggagatctgcacaatgcacactctgtgaacgagaaggtatcgattgagcagctagtagagtatacaaaaattatactcgattttatcatcagctggtgcagccggaaaaaagaacaatgacatgaaaatttcttcttgctgacaaggttcagcctgcccgttcatatacttgaacaaaaggacggaaaaaggacgtgatggaatgatcagcatttcagaatttcaggtaaaggatgtcgtcaatgtctcaaacggaaaaaagctggggagtattggtgatattgatatcaatgtgaccactggaaaaattcaggcgatcatactcggaggaaatgggaaagttctcggattttttggaaaagaagaggaattggtcattccatggcgaaatatagtaaaaatcggggaagatgtaatcttagtccgattaagtgaaccacatgcataaacctgcttgtctgccgcagattggcaaatgccggaagtctcgattcttccggcacatttcatttagaaatatgcaaatcggcgctcaacgaatgcagtaagatgtggtaaaataagtgggaaattccgcttttttaaatgtttgtcgaaaggttggatcatcatgaatacatatcacccattcagtcttaccacaccctcgacactcatgatacaagactgggttcaaacgaatcaaaacaacaaaaaagtcattgccggatttacgacaaaaaacggcggtgtcagccaaaagccttttgaatcgttaaatacaggattgcacgttcatgacaaagatgcagatgtagttaaaaatcgtgaatatattgccgatatgtttaatactgatttgcagtcttgggtattcgctgatcagacacatgataatcgcgttcagaaagtgacgcagagggataggggaaaaggcgcccgtgagtatcacacggctctaaaagcaacggacgggctatatacaaatgaaaaaaatgtatttttagcattatgctttgctgattgtgtgcctcttttcttttatgatccggttaagtcgcttgtcggagtcgcccatgccgggtggaaaggcaccgtcaaacagattggcagagaaatggtgaagcaatggactgagaaggaaggttcaaatccctcagatatttacgctgttattggcccgtctatcagcggagcatgctatacggtagacgaccgcgtcatggatgctgtccgcgcattgccggtttcagcagaccttgccgttaatcagacggcaaaggcacaatatcagcttgatctgaaagagctgaaccgtcttatactgatggacagcggtttggcaagtgaacaaatttctgtcagcggtttatgcacggaaagcgagccgtctcttttctattctcaccgccgcgatcaggggaaaactggacggatgatgtcctttatcggaatgaaggaggcataaaagatcttgcgtgttgttgataatttacgacatataaacgaacgaataaacgaagcatgtaacagatcgggccgcagctccgacgaagttacggttattgcagtcacaaaatatgtatcacctgaaagagcacaggaggcagtagatgctggcatcacctgcctcggagagaatcgggatgcggaactgctccgcaaacaggaattgatgaaagggaatccggaatggcattttatcggcagtctgcaatcaagaaaagcaaaatctgtcgtcaatgcggtttcctatatccattccctagaccggctctcattagcgaaagaaattgaaaaacgggctgaaggtactgtacgatgctttgtgcaggtcaatacctctcttgagccttctaaacatggcatgaaaaaagaagaagtcattccattcatacaggagctttccggtttcgaacatatccttgttgccggactgatgacaatggctccgctgactgatgatcaagatcagatcagaagctgtttcaggtcgctgagagaactccgtgaccaggttcagaagctgaaccagccgaacgctccgtgtactgaactgtcgatgggcatgtcaaatgattttgaaattgcaattgaagaaggagctacttatattagaatcggctcatcgttagtcggaaatgaaacagggggtgtacagcaatgagtatgaaaaataaactgaaaaactttttctcaatggaagatgaagaatacgaatatgaatatattgagacagagcgggaatctcatgaggagcatgagcaaaaagaaaagccggcttatacggggaataaaccttcgggcaaacagaatgtagtgagcttgcaaagtgttcagaaatcctctaaagtggtgttgagtgagccgcgcgtttatgcggaggcgcaggaaatagccgaccatttgaagaaccggcgggcagttgtcgtcaatcttcagcggatacagcatgaccaggcgaagcggattgttgactttttaagcggaaccgtttatgccattggcggcgatattcaaagaatcggctcagatattttcctctgcacgcctgacaacgtagatgtatcaggcacaatttctgagctcatatctgaagacgaacatcagaggtggtaaagcgagatgatcctttatcaagttttttcggttttaagcttattaatcacaatatactcatttgccctgatcatatatatttttatgtcatgggtgccgagtacgagggaaacagcagtcggacgttttttagcttcgatttgtgaaccatatctcgaaccattcagaaaaatcatccctccgattgcaatgctggatatttcaccaatcgtagcaatacttgtgcttcggtttgcgacaaccggcttgtggggactttatcgcatgattgcgttttaatgtgacagtttgataggggcttggcagcagccaagcctctttacatagaagggaaagacgatgagcgatatatatcagcacttcagaaaagacgagcgggcctttattgatcaggcgctcgaatggaaaagaattgtccaggagcagtaccggatgaagctgaccgactttttagatccccgagagcaggtcatcctctctgctgttacgggacaggctgatgtcgggcttgctttttccggcggctatgacagagcggagcgaaaacgggcgattctgtatccagagtacattactccggaagaatcggattttgaattgcaggcgtttaacgtccgttatgctgacaagtttgtctcagtagatcatcgttctctgcttggtgcattaatgggcataggattaaagcggcaaaaattcggtgacatcgtgttttctgagacagcagtgcaattgattgtctcagccgataccgctgattttgtggctgcacagctgacccaagcaggcaaagcggcggtcagcctagagaaaattgacttgtcagaccttaacattccagcagttgatgtcgaaataagagatgacacggtttcttctttaaggcttgacgccgtctgcgcctctatgagcaggcaatcccgccagaaatcacagacgcttgtgaaaaacggccttgtgaaagtgaactggaaggtggttgaagatccttcatacatagtcgcggaaggggacatgctgtcaatcagaggttttggccggtgcagcttaacaaaaatcgaaggaaaaaccaaaaaagacaaatggagagttacgtttgaacgacaaaaatagtcggtttttcagtttttttctccatctgtgcgaaatttgttttataatgtgaactagataaccgtactgaaatgtaaaaaatggaggtggcatcatgccattaacgccaaatgatattcacaacaagacgtttacaaaaagttttcgcggatatgatgaagatgaagtaaatgaattcctagcccaagtcagaaaagattacgaaattgttctccgcaagaaaactgagcttgaagcgaaagtcaatgagctagatgaaagaatcggacactttgccaatattgaggaaacattgaataaatcaattttagttgctcaagaagcggctgaagacgtaaaacgcaattctcaaaaagaggcaaagctgattgttcgggaagcggagaaaaacgctgatcgcattatcaacgaatcgttatcaaaatcaagaaaaattgcaatggaaattgaagagctgaaaaaacagtctaaagtgttcagaacacgtttccaaatgctgattgaagctcagcttgatcttctgaaaaatgacgattgggatcatctccttgagtatgaagtcgacgctgtatttgaggaaaaggaataaattctctgattatcttgacattttcttagcttgtcgaatataatacgttcataaattcagatgaaaaaacggttgaaagggacagtcatgtttccttcaggccttcatagcgacccggagatggtgagagtccgggatggccggaatcatgtagatcagccctttagtttccttgctgaactcacagtaggttaggacgttcatcacgttacgatgctcaagaggaaaaagtgtatgctggctttttctaaaagggtggtaccgcgagataagctttctcgtcccttatgggatgagagggctttttttattttctgaaaaaatgcagtggaggaatgaaaatggattttaaagacacgctcttaatgccgaaaacagatttcccgatgcgtggaaatttgccaaaccgtgagcctgacattcaaaaaaaatgggaggaagaggatatctaccgtcttgttcaggaacggacgaaagaccgcccgaaatttgttttacatgacggacctccgtatgcaaacggcgacatccatatgggccatgcacttaacaagattttgaaagacttcattgtccgctataaatcaatgagcggctacaacgcaccgtatgtgccgggctgggatacacacggattgccaattgaaacagctctgacaaaaaacaaaaaggtcaaccgcaaagaaatgtcagtagcggaattccgcaaactatgcgaagagtacgcttggaagcaaatcgagggacagcgtgagcaattcaaacgtcttggtgtccgcggtgactgggaaaacccatacgtgacattaaaaccggaatacgaagcgcagcaaatccgcgtatttggtgaaatggcaaaacgaggctacatttacaaaggccttaaaccggttaactggtcaccttcaagtgagtctgctctggctgaagccgagatcgaatatcaagacaaacgttcagcatctatttacgtcgcttttggtgtaaaagacggaaaaggcgttcttgaaaacggcgagcgcatcattatttggacaacaacgccttggacaattccggcgaacctcggaatttcagtgcaccctgatcttgagtacagcgtgattgcagtaggtggtgaccgctttgtcgtagcaagtgcattagtcgaaaatgttgcatcggcatgcggatttgatcagtatgaagtgacaagaacggtcaaagggaaagaccttgagaacattatcgctgaacacccgctatatggcagagactctctcgttatgcttggtgaacacgtaacaactgatgccggaacaggctgtgttcatacagcgccaggacatggggaagatgactttatcatcggccaaaaatacggtttagatgtgctttgcccggttgatgaaaaaggtgtaatgacaagcgaagctcctggctttgaaggcatgttctatgatgatgcaaacaaagcgatcacacagcagctcgatgaaaaaggcgcacttgtgaagcttgaattcattactcactcttatccgcatgattggagaacaaaaaaaccaaccattttcagagcgacagcgcaatggtttgcgtctattaaagatttcagatcagacctgctggatgccattaaagaaaccaaatgggttcctgaatggggcgagcagcgtttgcacaacatggttcgggaccgcggagactggtgtatttcgagacagcgtgcgtggggtgtgccgattccggtattttacgctgaaaacggagaaccgattattacagatgaaaccattgaacatgtttctgaattgttcagacagcacggatcaaacatttggtttgaaaaagaagcaaaggatcttcttccggaaggctttacgcatcctggcagcccgaacggcacatttacaaaagaacaggatatcatggatgtttggtttgattcaggctcttcacatcaagcagtgcttgaagaacgtgatgacctcgttcgcccggctgatttatacctagagggatctgaccaatatcgcggctggtttaactcttctctttctacagcagtagccgtaacagggaaagcgccgtataaaggtgtgctaagccatgggttcgcactggatggagaaggacgcaagatgagtaaatcaatcggtaacgttgttgttccggctaaagtcatgaaacagcttggtgccgacatcttaagattatgggtatcttcagtggattatcaggcggacgttcgcgtgtctgacgccattctaaagcaggttgcggaagtatatcgtaaaatccgcaacacgttccgtttccttcacggcaaccttttcgattttgatccaaaaacaaatgcggtggctgtcgaagatcttcgtgaagtggatcagtatatgctgattaagctgaacaagctgattgataaagtgaaaaaagcgtatgatgagtacgaatttgcggttgtgtatcacagcattcataatttctgcacaatcgaattgagctcattctaccttgattttgcaaaagatattgtctacatcgagcatgcggatcatccggatagacgcagcatgcagacagtattctatgaaacgcttcttgctttagtgaagctttcagcgcctatccttccacatacggcagacgaattgtggtctcatttaacatttgttgaagagcagagcgttcagctgacagatatgccggaaacaatcgcggttccaaacagtgaagtgactgaagaaaaatttgaccgttttatggctcttcgtgatgacgtgctaaaagcattagaaactgcgcgaaatgaaaaaattatcggtaaatctttggaagcaaacctgaaattgtatccaaacaaagaaaacaaagagctcttggcttccataaaagaaaacctttctcagctgtttattgtgtctgaactgacaatcagcgaagaaaatgatgcgccgaacgatgcgcaaagctttgcgacgggtaaaatcgctgtcgagaaagcggaaggcgaaatgtgtgagagatctcgtgtgatttcaaaagatgtaggggcaaatccgaaatatcctacactttcattacgcaacgctgaaatcgttgaaaaatactatcaaaaataatgaaaagggcccggcgtaaaagccgggctttttttgtgccaagagtgacatcctttagaacggcaggaaaaatcttatgggctttagatcatcattcataggcaacaataaaggtactacgttaagagcaggagttgtgaagaatgaatgatcaactgaccgcaatttatacggaacttcttctgatgaaagaagaattacagtcgagattatttgagtattcttgctttcaggtttctacaagcccgcaagcagcaatcaatcataaacaaaaagcaactctgatctatcatattaaagaagagcttcaagacgttctccttgcattgtccaaaatcgaaaacggcacattcggatactgtgaagaaaccggggctcccattcctctttcaaagctggcagtgctgccgacggcccgaacagcaaacgattttctttattctgtccaatttgagaaaaaaacgcttccgatatggaaatcaacggatatcgaatatggtcaggcactgtatgaataacagtgtctggccggttattatgcctgatatttctttactccagtgctttttattgataaaatgcataatggattaaagtaaccgtaaactggaggaacgtttgtgctgtattatatgattgcactacttattattgcagccgatcaattgacaaaatggctagttgttaagaacatggaacttggccaaagcattccgatcattgatcaggtattctatatcacctcccatcgcaatacgggtgctgcatgggggatattagcgggtcagatgtggtttttctacctcataacaaccgctgttattattggtattgtttattacatacagcgttatacaaaaggacaaaggcttcttggcgttgctctcggacttatgcttggcggtgccatcggcaactttatcgatcgggctgtcagacaggaagttgtggattttatccatgttattattgtcaattacaattacccgatatttaacatcgcggactcttcattatgtgtcggcgtaatgcttttatttatacaaatgctgttggacagcgggaaaaagaaaaaggagcaatagcatgaatcaaattgatataaccgcttcagaagaacaaaaaagtgagcggattgataaatttttggcatcgactgagaatgattggtcaagaacccaggttcagcaatgggtaaaagacggacaggttgtcgtgaacggaagcgcggtgaaagcgaattataaaattcagccgggtgatcaggtgaccgtcactgtacccgaaccggaagcgctcgacgtcctggcagagcctatggatctggatatttattatgaggaccaggatgtgctggtcgtcaacaaacctcgcggaatggttgttcacccagcacccgggcatcttacgggcacacttgtaaacggccttatggctcattgcatagacctttccggaataaatggtgtgatgcgcccgggtattgttcacagaatcgataaggacacgtccggtttattaatggtggcgaaaaatgatatggcgcacgagtcacttgtaaaccaattggtcaacaaaacggtcacgcggaaatatacggcagttgtccacgggcttatttctcacgatgatggcacaattgacgcgccgatcggacgagataagaaagaccgtcaaagcatgactgtgacacgtgatggcaaaaacgctgtcactcattttcatgtactagagcgttttcaggattttacgttagtggaatgccagcttgaaacagggagaacccatcaaattcgtgttcatatgaaatatatcggcttcccattagcaggcgatccgaaatacggcccaagaaaaacaatcgactttaatggccaagcgcttcacgcgggagttttaggttttgaccatccacgaacaggagaatatgtcgaatttgaagcgccgcttcctgaggatatggcagaattaatcgaaaacctcagaaaaaacggttgacagagggtttcttttctgaaataataaacgaagctgaatagattctttaaaacagtccagagaggctgagaaggataacggatagacgggatgcgtgtataggcgcgcaccttgtcctaaaacccctctatgctctggcaggaggggttttttcttctatatgaactgtgaggtgtcacacattgaatcaaaaagctgtcattctcgacgaacaggcaatcagacgggcgctgaccaggattgctcacgaaatgatcgaacgcaataaaggaatgaataactgcattcttgtcggcattaagacaagagggatttatctggcaaaacgccttgcggaacgcattgaacagattgagggaaatcctgttacagtcggtgaaattgatattactctttacagagacgatctttctaaaaaaacgagcaacgatgaaccgcttgtaaaaggtgcagatattccggtagatatcacagatcaaaaagtcattctcgttgatgatgttctgtataccggaagaacagtcagagcaggaatggatgcgcttgttgatgtaggcagaccttcctccattcagcttgcagtgcttgtggacagaggacaccgggagctgccgatccgagcggattatatcgggaaaaacatcccgacatcaaagtctgaaaaggttatggttcagcttgatgaggtagaccaaaacgatctcgtcgccatttatgaaaacgaataatagatcacctttttaagggcaatccagagaggttgcaaagaggtgcacaacaaaggcccaaaaagcattcggcaggtctttgtatgcctctttgcgtaaaaaagcaaagaggtttttttatacagtcattgagtcatcctaaaatgaaagtcaacaatcagggggaaatcatcatgagtaagaaaaaagtaaatttaggggtcagggatgtcccgacacctttctcttgggtttcattcagccttcagcatttgtttgccatgtttggctcaaccatcttggttccgaagctcgtcggaatgagtcctgctgtggcgttggtgacaagcggcatcggaacactggcgtaccttcttattacgaaagggcaaattccggcgtatctcggttcatccttcgcctttatttctccgatcattctggtaaaagcgaccggcgggccgggagcggcaatggttggagcgtttcttgcagggctggtgtacgggctgattgccttattgatcaggcagcttggaacaggatggctgatgaagattctcccgcctgtagtcgtagggcctgttattatcgtcatcgggctgggactggcaagcactgcggtaaacatggcgatgtatgctgatccaaatgcgagtgagttggtctacagcttaaagcactttagtgtcgcaggagttacgctggcaatcacgattatttgtgcgattttcttacgaggatttttaagcctgattccggttctgatcggaatcatcggcggatacctgtttgcccttactcaagggattgtcaacttccagccggtgcttgacgcgaaatggttcgcagtgcctgaatttatcattccgttcaaagattattcaccatcagttacactcggcatcgcagccgcaatggttcctgtcgcatttgtcacaatgtcagagcatatcggccaccaaatggtgctgagcaaggttgtcggacaagacttcattaaaaagccaggtcttcatcgctctattatgggtgacagtgtggcgacaatcctcgcttccctgatcggcggtccgccgacaacgacttacggagaaaacattggcgtgctggccatcacaagagtattcagcgtctttgtcatcggaggagcggcagtgattgcctgttgcttcggctttatcggcaaaatttcagcgctgatcagttcagtgccgtcagcggtcatgggaggcgtctccttcctgctgtttggaatcattgcttcaagcggtctgagaatgctgattgacaacaaaattgattatgaaaacaacagaaacctcattattacatcagttatccttgtcatcggtgtaggaggcgcttttatccaagtgtctcaaggcggattccaagtgtcaggaatggcgcttgccgcaattgtcggtgtcatcttaaacctgattcttccgcaggcgaaggaagagcagaaagacacatctgaacaacatcatatctaaaaccttttaatgaaagtccagagaggcttggaagggttatgaagagaagggagcttcaatgctgccctctatttaaccataccccgagtctatcttagaccggggtttttttcagccttaagttgaaaagagaggggaaagaacatgaagcatttaacgacgatgagtgaactcggcactgaggaaatcaaagatttgcttcaaacagcacaagaccttaaaagcggaaaaacagacaatcagcttacaggaaagtttgccgcaaacctgtttttcgaaccgagcacgagaacgcggttcagctttgaggtcgcagaaaaaaagctgggcatgaatgtgctcaaccttgatggaacaagcacaagcgtgcaaaaaggcgaaaccttatatgacacgatccggacgctcgaatcaatcggtgtggacgtctgcgtcatcaggcacagtgaggatgagtattatgaagagcttgtcagccaggtgaacattccgattctgaatgcgggagacggatgcggccagcatccgacacaatcactgcttgatttaatgacgatttatgaagagttcaatacgttcaaagggcttaccgtctccattcacggcgacatcaagcatagcagagtggcaaggtcaaatgcggaagtgttgacaagattgggtgcccgggtcctattttccggcccttcggaatggcaggatgaagaaaatacattcggtacgtatgtctcaatggatgaagcagttgagtcttccgatgttgtcatgctgctgcgcattcaaaatgaacgacatcagtccgctgtcagccaggaaggctatttaaacaaatacggcttgaccgtagaacgggctgagcgtatgaagcggcatgcgatcatcatgcatcctgctccggtaaacagaggagtggagattgatgacagcttagtagaaagcgaaaaatcaagaatcttcaagcaaatgcaaaatggcgtatttatcagaatggcagtgatacagcgtgccttacaaaccaatgtgaaaagaggagaagcagcgtatgtcatatctcattaaaaacggctggatactaaacgaaaatggtgaaaaaacagaagcggatatccgagtgactggagaaaccatcaccgcaatcggcaagcttgatgcaacggataatgaaacggtaattgatgcgaaaggtttgctcgtttcacctgggtttgttgatctccacgtgcatttcagagagccgggcggagagaaaaaagaaactattgaaaccggggccaaagcggcggcacgcggcggctatactacagtagcagcaatgccgaatacgcggccggttcctgatacaaaggagcagatggaatgggtgcaaaacagaattaaagaaacatcatgcgtcagagttcttccatatgcatccattacgatcaggcaaatcggcgatgaaatgacaaactttgaagcattaaaagaagccggggcatttgcttttacagatgacggtgttggtatacagacagcaggtatgatgtatgaagcgatgaaacgggcagctgcaattgacaaagcgattgttgcacattgcgaggacaactccttaatttacggaggaagcgtacatgaggggtcattctccaaagcgaacgggctaaacggcattccttctgtgtgtgaatcggttcatattgcccgcgatgtgctgctggctgaggcggcaaactgccattatcatgtatgccatatcagcacgaaagaatctgtcagagttgtacgcgatgcgaaaaaagcgggaatcagagtgacagcagaagtgtcgccgcatcatttgctgctttgtgatgaggatatcccggggctggacacaaactataaaatgaatccgccgctccgcagtgcagaagacagagctgctttaattgaaggtcttttagacggaacaattgattttatcgcaacagaccatgcaccgcatacggaagaagaaaaaaacacagaaatgaaactggcgccattcggaattgtcggcttagaaacagcattcccgcttctttacacacactttgtcaaaaatggcagctggtcgctgaagcagttgattgactacatgacaatcaagccatgcgaagcgttcggtctcccatatggaacattacaaacggggcaagctgcggacattacgttaatcgatttagaaaaagaagcagttatagacaaagacacgtttttatcaaaaggaaaaaatacaccattcaacggcatcagctgcaccggctggccggtcgctacaattgcggcagggaagcttgcttatgaagaggggagacttgtcaaatgaagagacgattagtactggaaaacggagcggtattcgagggagaagccttcggaagcttagaacacaacatgggagaagtcgtttttaatactgggatgacaggctatcaggaaattttatctgacccttcttactgcggacagatcgtaacattaacatacccgcttatcggaaattacggcattaaccgtgatgattttgaatccattaccccttttgtaaaagggctgatcatcaaagaattatgtgagctgccttccaactggcgttcagcatacaccttagacgagtatttaaaaatgaaaaacattcccggactccaggggattgatacaaggaagctgacaagaatgatccgcacggcaggcgcgctaaaaggaacattcgcttcatctgatgaagatatcgaagcagtgctgaaaagactgaacgaaacggaattgccaagaaatcaagtatcccaagtatcagcaaaaacagcatatccgagcccgggaagaggcaaacgcatcgtcttggttgacttcggcatgaaacacgggattctaagagagctgaacaaacggaaatgtgacgtcatcgttgtgccttacaacattacagcggaagaggtgcttcagctgaaaccggacggtatcatgctttctaacggacctggagacccgaaggatgtgcctgaagcgattgaaatgattaaaggtgttcttggaaaagtgccattattcggaatatgtcttggccaccaattattcgcgctggcgtgcggggcgaatactgaaaaaatgaaattcggccacaggggctcaaaccacccggtaaaagagctggctacaggaaaagttgccttaacatctcaaaaccatggatatacagtttcgtctatcagtaaaacagaactggaagtgacgcatatcgcaattaacgacgatacgattgaagggctgaagcataaaacattgccggcatttacggttcaatatcatcccgaagcctcacctggtcctgaggatgccaaccatctatttgacagattcatcgaaatgatcgaaacaacagagaaagaaggggaagcggtatgccaaaacgcgtagacattaacaaaattttagtaatcggatctggaccgatcatcatcggccaagcagcagaatttgactatgcgggaacacaagcctgtcttgctttgaaagaagaaggctatgaagtcatccttgtcaactcaaaccctgcaacgatcatgacagatacagaaatggctgaccgggtttacatcgaaccgctcacacctgaattcctgacacgaatcatcagaaaagagcgcccggatgccattcttcctacactcggaggccaaaccggtttgaatcttgcggttgagctttctgaaagaggcgttttggcagaatgcggcgtcgaagtgcttggcacgaaactgtctgcgattcagcaagctgaagaccgtgacttgttcagaacattaatgaatgaactgaatgaaccggtgcctgaaagtgagattatccactcccttgaagaagcagaaaaattcgtcagtcaaattggattccctgtcattgtccgcccggcatatacattaggcggaacaggcggaggtatctgctcgaatgaaacagagctaaaagaaatcgttgagaacggcttgaaattaagcccggtacaccaatgtcttcttgaaaaaagcatcgccggctataaagaaatcgagtatgaagtcatgagagacagccaggatcacgccattgtcgtttgtaacatggaaaacattgatccagttggaatccatactggagacagtattgttgtcgcgccgagccaaacgctcagcgatcgcgagtatcagctcttgcggaatgtatcgttaaaactgattcgcgcgcttgggatcgaaggcggatgtaacgtccagctcgccttagatccagacagcttccaatattacattattgaagtaaatccgcgtgtcagccgttcatctgctcttgcatcaaaagcaacgggatacccgatagcaaagctcgctgctaaaattgcagtcggactttcattagatgaaatgatgaacccggtgacaggaaaaacatatgcagcatttgaacctgctcttgactatgtcgtatccaaaattccgcgctggccgtttgataaatttgaatcagcaaacagaaagcttggcacgcaaatgaaagcgacaggtgaggtcatggcaatcggccgcacgcttgaagagtcattgctgaaggcagtgcgttcgctggaagcggatgtgtatcatcttgaattgaaggacgccgctgacatttcagatgagcttcttgaaaagcgaattaaaaaggccggtgatgaacgcttattctacttagctgaagcgtacagaagaggctacacggtagaagacctccatgaattttccgctatcgatgtcttcttcttgcataagctgttcggaatcgtacagtttgaaaaagaattgaaggccaatgcgggcaatacggatgtgctgagacgggcaaaagaactcggcttctctgatcagtacattagccgcgagtggaaaatgaaagaatctgagctttacagcttgagaaaacaagcggggattgcgccggtattcaaaatggtagatacgtgcgcggcggaattcgagtcagaaacgccatacttctatagcacatacgaagaagaaaatgaatctgtcgttacagataagaaaagtgtgatggtgcttggttcgggtccgattcgaatcggtcagggtgtcgagttcgactatgcgacggttcactctgtatgggcaattaaacaagcaggctatgaagccattattgtcaacaacaacccggaaaccgtttcaacagacttcagcatctcagacaagctgtattttgaaccgcttacgattgaagatgttatgcacatcattgaccttgaacagccaatgggcgttgtcgtacagttcggcggacaaactgcgattaaccttgctgacgagctttctgcacgcggagtgaaaatccttggaacttcattagaagatttagaccgtgcagaagaccgggataaatttgaacaagcgcttggagaacttggtgttcctcagccgcttggcaaaacagcgacatcagttgatcaggcggtaagcatcgcgagtgatatcggttatccggtactggtgcgcccttcctatgtacttggcggccgggcgatggagattgtttaccatgaagaggaactgcttcattacatgaaaaatgcagtcaaaatcaatccgcagcaccctgtattaattgatagatacttgaccggaaaagaaattgaagtcgatgcagtatccgacggtgaaacagtcgtcattccgggaattatggagcacattgaacgtgcgggcgttcactccggagactcgatcgctgtttatccgcctcagtctctcacagaggacattaagaaaaaaattgaacaatacacgatcgcattggctaaagggctgaatattgtcggtttgctcaatattcaattcgtcttgtcgcaaggcgaggtgtacgtgctagaagtgaatccgagatcaagcagaaccgtaccgtttttaagcaaaattacgggtatcccaatggcgaatctcgcaacaaaaatcattcttggtcaaaagctggctgcgtttggctatacagagggccttcagcctgaacagcaaggtgtatttgtaaaagcgccggtcttctcctttgccaagctgagaagagtggacattacgttagggcctgaaatgaaatcaacaggtgaagtcatggggaaagattcgacacttgaaaaggcgctctacaaagccttgattgcttcaggtattcaaatcccgaactacggttccgtgcttttaaccgtagctgataaggacaaagaagaagggcttgccattgctaagcggttccacgcgatcggctacaacattttagcgacggaaggaacggcaggctacctgaaagaagcttccattccagcgaaggtcgtcggaaaaatcggtcaggatggcccgaacttgcttgacgtcatcagaaacggagaagcgcagtttgtcatcaatacgctgacaaaaggaaagcagccggcaagagacggttttagaatcagacgtgaatcagtagaaaatggtgttgcctgcctaacatctttagatacggcagaggcgatattgcgagtgctggaaagcatgacattccgtgctgatcaaatgccggcagtcaacacaaatcaggaggcggcagtcactatatgaaaaaagcgtatttgacagtatgttctaaccagcaaattgcagaccgggtgtttcaaatggttctgaaaggggagcttgtccaagggtttacaacccctggacagttccttcatcttaaagtgagcgaagcggttacgcctcttttgagaaggccgatcagcatcgcagacgtcaactttgaaaaaaatgaagtcaccatcatttatcgggtagatggtgaagggacaagactcttgtcactgaagcagcagggagaacttgtggatgtcctcgggcctttgggaaatggctttcctgttaatgaagttcaacccggaaagacggctttgctggtaggaggcggagtaggtgtgccgcctctccaagagctgtcgaaacgcttgattgaaaaaggggtaaatgtcatccacgttttaggattccaatcggcaaaggatgtattttacgaggaagaatgcaggcagtacggagacacgtatgtggcaacagctgacggaagctacggggaaaccggatttgtcacagatgtgattaaacggaaaaatctagagtttgatatcctcctcagctgcgggccgacaccgatgctcaaggcgttaaaacaggaatatgcccataaagaagtatatctgtccatggaggaacgaatgggctgcggaatcggcgcatgcttcgcgtgtgtgtgccatacaaacgaaagtgagacatcctatgtaaaagtatgtctcgacgggcctgtatttaaagctcaggaggtggcgctgtaatgctagaggtgaaattgccgggacttgatttgaaaaacccaatcattcctgcatcaggttgcttcggttttggaaaagaattttcacgtttttatgatttgtcttgtcttggagccatcatgattaaggctacgacaaaggagccgcgctttgggaatccgacgccgcgggtagctgagactggtgctggaatgctcaatgcgatcggtctccaaaatccggggctggatagtgtgttgcatcatgagctgccgtggcttgagcagtttgatacaccgatcattgccaatgtcgcaggttctcaagtcgatgattatgttgaagtcgcagaacatatcagcaaagcgcctaatgtccatgcacttgaattgaatatttcctgcccgaatgtgaaaacaggcggaatcgcttttggcacgaatcctgaaatggctgccgatttgacaaaagcggtgaaagaggtttcggatgtacccgtttatgtgaagctttccccgaacgtggctaatatcacagaaattgccttagcgatcgaggaagcgggagcggacggtcttacgatgatcaacacactaatcggcatgagactcgatttaaaaaccggcaaaccgatattagcgaataaaacagggggactttcaggccctgctgtgaagccggttgccattcgcatggtgtatgaagtcagccaggcggtcaacatcccgattatcggaatgggaggcgtgcaaacggctgaagatgccctggaatttcttctcgcgggagcaagcgcagtcgctgtcggaacagcaaactttgtgaatccttttgcatgtccagagattattgaacagctcccatctgttttgctccaatacggctatcaatcaattgaagaatgcatcggaaggagctggaatcatgaaaaacaacctgcccatcatcgcgcttgattttgcgtcagctgaagaaacacttgcgttcttagcgccttttcagcaagaaccgttatttgtaaaggttgggatggagctcttttatcaagaagggccatctatcgtgaaacaactaaaagaaagaaactgcgagctatttttagatctaaagcttcatgacatcccgactactgtaaacaaagcgatgaagcgccttgccagtcttggagtagacctcgtcaatgttcatgctgccgggggcaaaaaaatgatgcaggcagctctcgaaggcttagaagaaggtacgccggctgggaaaaaacgtccgtcacttatcgcggtaacccagctgacaagcacatctgaacaaatcatgaaagatgaactgctgatcgaaaagtctctgattgatacggttgtgcactacagcaaacaggcggaagaaagcggactggatggagtggtctgctctgttcatgaagcaaaagccatttaccaagcggtgtcgcctttatttctgactgtcactccggggatcagaatgtcagaggacgctgcgaatgaccaagtccgcgtagcgacgcctgccattgcaagagagaaaggttcatcagcgattgtagtaggacgctcgattacaaaagcggaagacccggtaaaagcctataaggctgtcagacttgaatgggagggaatcaaatcttgaaacaaatcatcgcaaaacatctattagacatccaagctgtatttttacgcccgaacgagccgttcacatgggcaagcggcattttatcaccgatctactgtgacaaccgccttacgctatctttcccagaggtcagaaacgatgttgcttcaggtatcagcaagcttgtcaaagatcattttcctgaagctgaaatgattgcgggaacagcaactgccggtattcctcatgctgctcttgcggctgaccgtttgaatcttccgatgtgttatgtgaggagcaagccgaaggcgcacggaaaaggcaatcagattgagggagctgtgcaagaggggcaaaaaacagttgtcattgaagacttaatttccacaggaggcagcgtgcttgaagcttgtgcagctttacaagcggccggctgtgaagtgcttggtgtcgtctcaatctttacgtacggacttcccaaagcggaggaagccttcgcaaaggcagaactgctatactactcattaactgattatgatacgctcacagaggtcgcgcttgaaaacggaaatattcattcagatgatctaaaaaagctgcaaacatggaaacgaaatcccgagtcaaaagattggtttaaaaaataaaaaataaattcaaatgatgtaaagaggcttcaaagccttgctgtacttgaaaacaggctgtgaggcctgtttttttattaatcctataaaaaaagtcgggttgacttatgttagaattgtgctaaaatttactacaaatctaaaaacttatcaagagcggctgagggactggacctatgaagcccggcaacctgcatagtttgtaaggtgctacttccagcaaaatgaattccattttgaaagataagggctgcatgctgttcctgtctttctttccgccggattgaaagttttttattttaagaggaaaaaaggctgtctgtgatatcagcagccgcgaatcacattacaattgggaaaagacaaccggcagaaagctactgtttgtttgtctccgaaaggaggaaagaagaaatgttaacgtacgataattgggaagaaccaacgattacatttccggaagacgatccttataaaggagcgctgtcagttttaaaatgggcatacggccattacggcaatcagcttgtttatgcctgcagtttcggaattgagggaatcgttctgattgacttaatttataaagtgaaaaaagacgcagagattgtgtttcttgatacaggacttcattttaaagaaacctatgaaacaattgaacgagtgaaagagcgttatccgggtcttaatatcatcctgaaaaaaccagacctcacccttgaggaacaagccgaagaacatggtgacaaactgtgggaaagagagccgaatcagtgctgctatcttagaaaggtcgttcctttaagagaggcgctttcaggacatccagcctggctttccggcctgcgccgtgatcaagggccaagccgtgccaatacgaatttcttaaacaaagatgaaaaattcaagtcagtaaaagtttgcccgcttatccattggacttggaaagacatttggagatacacatcccggaatgaactggactacaatccgcttcatgaccaaggatatccaagtattggctgtgcgccttgcactgctcccgcttttactgcagaggatttgcgctcaggcagatggaatggtatggcgaaaacagaatgcggactgcatgaataaggagctgcaaaatggaattagccgctattttatttagcttgtttttcgcgatgaatattggtgcaagcggcgctgcagcttcgatgggggttgcttacggctccggagccatcaaaaagaaaacctacgctttgatcctatgcgcagtcggtgtctttgccggggcggtcattggcggaggcgaggttgtaaaaacaatcagctccggcattattcctgagcagacgattacactgacgattgtttgcatcattattggagctgctgccctgtcgctctttactgctaatctgctcggcattcctttgtcgacaagtgaagtaacagtcggcgcggttgtcggcgtgggagtggcttataaagtattgtttgtgaacaatcttctgatcattgtgtcattttgggtttttgtcccgctgttcgctttcggcttcacctatttcgtatctaagctgtttcgttattttaagattgaagtaaaatcttctaaaaaacaaaaaatcctcggcattgttttgttagttgccggatttttcgaagcattctctgccggcatgaataacgtggcgaatgctgttggcccgttagtagctgccgatgtgcttgatgtcggaaaaggaaccttgtatggaggagcttttgttgctcttggcgcactgttattaggccggcgtgtgctagaaacaaacgggaagaaaattacgagattctccaaaggggaaggcattctcttatccggtacaggagcaggacttgtgatcatcagttctgtatttgggatgccggtgcccttggcgcaagtcacgtcatcgtctattatcggaataggcatggcaaaaaacggtccgaacgtgttccataaacaagttgttcaaacgatgctgaaggtatggatcgtatcgccgtttttatctttatcgatttcttatctgcttgtatccttgtttttaaaagcagattattattcgatctttatcatggtaagtgtgcttttagcggcgggcggtgccatcagcctgacaaaggccattcgtaaagagagacgctcagtccacgaacaaggcgggggaatctgatcattaatctgagtaattttataagttaactaggaggagatggatattatgagcttagcaccacacggaggaacattagtaaacagagtagatgaatcatatgatgtgagcggcattcaaaaagaaattgaacttgatttaatttctttcgcggatttggaattgatcggtatcggtgcatacagcccgattgaaggtttctttaatgaaaaagattacgtatctgttgtcgaaaacatgcgtctttcttccggtgttgtttggtctcttccaatcacgcttccggtcgatgcgcaaaaagcagcggaactgtcacttggtgaaacggtaaagttaacgtatgaaggagaaacatacggcgttatccaaatcgaagacctgtatgtgcctgacaaacaaaaagaagctgtcaatgtgtacaaaacagatgaacaggagcatcctggtgttaaaaagctgttcagccgcggcaatacatatgtcggcgggccgattacgttgattaaaaaagcttcaaaacagttccctgaatttacatttgaaccgttagaaacgagacgccagtttgcggaaaaaggctgggaaaccattgtcggtttccaaacaagaaaccctgttcacagagcgcatgaatacattcaaaaaacggctcttgaaacagtagacggcttgttcttgaatccgttagtaggtgaaacaaaatctgatgacattccagctgatgtacggatggaaagctaccaagtgcttcttgatcattattacccgaaagatcgcgttttccttggtgtctttttagcggcgatgcgttatgcaggcccgagggaagcaattttccacgcgcttgtcagaaagaactacggctgcacacatttcatcgtcggccgtgatcatgcaggtgtaggtgactattacggaacatacgaagcacaggagctgtttgacacatttaaacctgaagaactcgggattacgccgctgaaatttgagcacagcttcttctgtaaaaaatgcggaaatatgggaacagcgaaaacatgccctcatggcagagagcatcacgtcattttatcaggcactaaggtaagaggtatgctgagagacggtgtgctgccgcctgctgaattcagtcgaaaagaagtcgtagaagtgttaatcaaagggatgaagaaaaaagaagaagtaggcgtatcttaaggaggactggcagtgacaaatcgcgatattgtatggcatgaagcctctatcacaaaagaagagtaccagcaaaaaaacaagcataaaagctccattctctggctgacagggttaagcggctcaggcaaatcaactattgccaacgccgctgcgagagaattgtttgagcaaggctaccaagtgattgtgctggacggggataatatccgtcacggcttaaataaggatcttggtttttctgatgaagaccgaaaagaaaacatccgccgaatcggagaggtggcaaagctttttgttcagcagggaaccattgtgattactgcttttatctctcctttccgcgaggacagacaacaggttcgcgagcttgtggaagcgggcgaatttaatgaagtctacattaaatgcgaccttgatatttgtgaacaaagagatccgaaagggctttacaaaaaagcaagaaacggcgagattccgttttttacaggaattgattctccttatgaagaaccggaagctccagagctcgttcttgattcaggacaacatgaccgtgaagcgtgtaaaaatcagctgatcgagtttgttaaacaaaaattgagctgaatatgatctgctgcgttcttctcagatgccggaatgcaagcgagaacatcatcacagcgaatgctctggaagaactcgaatagatcgggggaaatacgatggggaaagtatatattgtaggagcgggtcctggtgaccctgatctgttgacaattaaagcgctgaaagccattgaaaaagctgatgtcatcttatatgacagattagtaaataaagagattttacaatatgccaaagagcaagcagacctgatctactgcgggaagcttccagattttcatacgatgaagcaggaaaccatcaatcgatttcttgtgaagtatgcgcaaaaagggaaaatggttgtcagactgaaaggcggagacccttttgtgttcggcagaggaggggaagaagcggaatgcctctctgaaaatggaattccgtttgaaatcatccccggcattacgtctggaatcgcggcagccgcttatgccgggattcctgttactcatcgggaggcgggctctaacgtcgcttttgtaacgggtcattataaaaaagaagaagattttgaggaaaagtggaaagcgctggctacaggaattgatacacttgtcatctatatgggtatcaaaaacgtgcagcagattgaaagaaaactccttgaaaacggccgggacggttctacgccggcagcctttattcattggggaacaacggacaagcaaaagtctgttttttgtacagttgacaccctttcagaaacggtgataaaagaaaacattacaaatccgagtttaattgtcattggaaatgttgtaaattatcactataagctggaatggtttgaatctgaactgaaaaaacaagatttaagcgaggcgttgtaaaaatgaaacaagcaattttatatgtcggccacggcagccgggtcaaaaaagcgcagcaagaagccacagcctttttggaaggatgcaaggcccacatctctgtgccagtacaagaaatcagctttttagagcttcaggagccggcaattgagacaggatttgaagcatgtgtgaagcaaggcgccactcatatcgcagtggtgcctctgcttcttttaacagctgcgcatgcaaaacatgatattccggaagaaattgcccgtgctgcatctcgatatccgtcagtccgcatttcatacggaaagccgatcgggattgacgaagaagtagtcaaggctgtatatcaccgaatgaaagacataggtgttccatatgaaaatgccagagtggtactcatcggaaggggaagttcagatccagatgtcaaaagagacgtaaccggtattgctaatcttcttcaggaaatggttccagtcaaggaagtcattccgtgctttttgacagcatgcggcccgaattacaaagaggttttttcagaacttaaaaaagatgacggcataacaacctttatcgttccatatttgctctttacgggtatgctgatgaatgaaatcgaacgagaggttcagaaattaaaagctcataatccgaacgtctacctctcttcctatatcggttttcatcctcatgtgaaaaacgcatttttgaaccgtgtgagagaaactgcggcaaattctgagggacaatttgattttgatggagattcatatgcttccgctgcacattagcctggaaaagaagaaggttgtgattgcggggggcggcagcatcgctctcagaaggctgaaatcggtgatttctgagggagctgatataacgctcgtcagtccggatgttgaaccggaaatcaagcaaatggcagaagagcgacgtatcaaatgggaaaaacggacaattgaaaaagaagattatctcaatgctttcttcattattgctgcgacggataatgcggcagtgaacaaagaaattgcccaatccgcttcgccttttcagcttgtcaattgtgtcagtgacgctgagcttggcaatgtatatatgccgaaaattgtaaaaagagggcatgtcactgtgtctgtttctacaagcggagccagtccaaagcacacgaaagagcttgctgaaaacgtggataagctgattgacggcgattttattgctgaagtgaacaggctttatcaggtgagaaggaagaaataagccagagcatacaaatgctctggcttttctttatgcggctcagctttttttgagcttgatgacagtatcagcatcaggcgtgacaaagacggtatgctggctgtcataggtgacgaaaccgggtttcgcgccgtttggttttttgacatgcctgatttttgtataatctacaggcactgaacttgaatctttagcttttgaaaaataagctgcaattgtcgcggcttccatgattgtttgctcatccggttcgctgcttctgatcacaacgtgggagcctggaatgtcctttgtgtgaagccagatatcgtctctggccgccgctctggtcgttaaatattcattttgacgattgttcttacccactaaaatcgtcaggcctgaggtggattcatatgtttctaacaccggattgtgcggtttttgctttttctggcctttttgctgcttagggcgtaaatatttgccctcaacaagctcttccctgatttcgctgatatcccggggagaagcggacgaaagctgctgaaacagctgatcaaaatattcgatctcttcctgtgccagcctgatttgctcctcgacaactgcgaccgaatttttcgctttctgatacttcgtgaaataggcctgtgcgttttcagaaggcgttttgtttgggtttaaaggaatcgtgattgtcgggctttcttcattataataattgatgacctcagcctgtttatcaccttttttcaacatatataaattagcggttaaaagctccccgtaaagctgaaattccttcgcgttttccgaatactccagggttttctctaattttttgattttgttggcattcttcttccgttcgttcacaacaaaacgctcaagatcctgagcctgttgcttgacccggtctcgttcagcttttccgaaataaaaacggtcgagcagttcgcttaatgaatcaaaacggcgcgcttcgccctttagatgagtcagctccagcaggtaaaaatattcctttccgtttacagtcgtaatgttgggaatgaaacggtgctctttcacttcagcaaacagtgccagcaacgcttttggcagtgtgactttgttggcaaggcctgctctgtgaaccgcttctttggcgaaaagcggagacacgcctgaaaagtggtcgacaatttgtttatcaagccttccttcttgaaagctgaggtgacgcaaaatatcatcttctgacgcctcaagaggcgatattttgtcctgagcaggcggaagcttataatcttggccgggcagtactgtacggtagctgttcattgacggtgataagtgcttaagtccgtcgatgatcacattttctgctgcgtcagtcaaaatgatattgctgtggcggcccataatttctacataaagctttcgtacggtttcatcgccaatttcgtttcggcttttgatatgaaaaatcataatgcggtctaagcccgcttgttcaattttctcaatgaatccgccttcgatatgctttctcagcaacatgcaaaacattggcggttcgcttggattttcataagcttgtgccgtgatatgcacccgtgaatagctcggatgtgccgataataatagtttttggttttttccattggcacggatgtggaaaatcacatcgtgcttatatggctgatggacttttgtaattcgtccgcccattattttctcgttaagttcgtgtgtcattccgtatgtaaacatgccatcaaacgacatatgcaatacaccctctcattcttcctgcattcgataattatagcatgaaatgggacgagtcagaataagcatgcttatagagtgatatctctataagagagcaggggagtggacgagcggaatgaagtttcatgaaatgggacaaacagatttactagaggcaaccaatacgtccatgaaacaaggattaacagaaaaagaggtaaaaaaacgccttgacaagcatggaccaaacgagctgcaagaaggggaaaaaacttcagcgcttctcttgtttttcgcgcagttcaaagattttatggtgcttgtgcttctggcggcaacgttaatctcaggatttcttggtgaatatgtagatgcggttgcgattattgcgattgtgtttgtgaatggcatacttggtttctttcaagaaaggcgtgctgagcaatctcttcaggctttaaaagagctttcaacaccgcatgtcatggcactcagagaaggaagctggacaaagattccttctaaggaactggtgccgggtgatattgtgaaatttacgagcggggacagaattggcgcagacgttcgaattgttgaagcaagaagccttgaaatagaagaatcagcgctgaccggggaatcaatcccggttgtgaagcatgctgataaattgaaaaaaccggatgtttcacttggcgatattaccaatatggcatttatgggtacgattgtgacccgcggcagcggtgtgggggttgtcgtcgggacaggaatgaatacggctatggggaaaattgccgacatgcttgaatcggcagggacattgtcaaccccgctgcaaagaagactggagcagctcgggaagattttgattgttgttgcattgcttctgaccgtacttgtcgttgctgtcggtgttattcaggggcatgatctgtacagtatgtttttagcaggtgtctcgttagcggtagcagctattccggaggggctgccggcgattgtgacagtggcgctatcgcttggtgtacagcggatgattaaacaaaaatccattgttagaaagcttcctgctgttgaaacgcttgggtgtgcgtctatcatttgttcagataaaacagggacaatgacccaaaacaaaatgacggtgacacatgtctggtccggagggaaaacatggagagtggcaggggccggctatgaaccgaaaggaagcttcacactaaacgaaaaagagatcagtgtcaatgaacataagccgcttcagcagatgcttctgttcggagcgctttgtaacaactccaatatcgagaaaagagacggcgaatatgtgcttgacggagatccgacagagggagcgctgctcaccgcggcaagaaaaggcggtttttcaaaggagtttgttgaatcaaactaccgggtggtcgaagaatttccgtttgattctgcacggaaaatgatgactgtcatcgtagaggatcaagacagaaagcgctatatcattacaaaaggtgcaccggatgtactgatgcagcgatcttcccgtatttattatgacggctcagcggctcttttttcaaatgaaagaaaagcagaaacagaggcggtattaagacatttggcatcacaggcgctcagaacgatagcggtcgcctacaggccgataaaagcaggcgaaacaccgtcaatggagcaggcggaaaaagatctgaccatgcttggcctttcaggtatcattgaccccccgcggccggaagtcagacaggcgataaaagaatgccgtgaagcaggaattaagaccgttatgattacaggtgatcatgtagaaaccgctaaagcgatagcgaaagacttgcgcctccttccgaaaagcggcaaaatcatggacggcaagatgctgaatgaactttctgaagaagagctttctcatgtggtggaggatgtatatgtatttgcccgcgtttcccctgaacataaactaaaaattgtaaaagcctatcaggagaacgggcatattgtggcgatgacgggagacggcgtcaatgatgctcctgccattaaacaagctgatatcggcgtctctatgggcattaccgggacagatgtggccaaagaagcatcatctcttgttctcgtggatgataattttgcgacgattaaatcagcgataaaagaaggcaggaacatctacgaaaatatcaggaagtttatcagatacctgttggcgtctaacgtcggagaaattcttgtcatgctgtttgcgatgctgctggcccttcctttaccgctcgttccgattcagattttgtgggtcaacttggtgacggacggattgccggcgatggcgctcggcatggatcagccggaaggagacgtcatgaagcgcaagccccgtcatccgaaagaaggggtatttgcccgcaagctaggatggaaggtcgtttccagaggatttttaatcggagttgccactattttagcgtttatcattgtgtaccaccgcaatccggaaaacttggcttatgcccagacgatcgcgtttgccacattggtgctcgctcagcttattcacgtgtttgactgccgcagcgaaacttctgttttctctagaaatccgtttcaaaacctgtatttaatcggcgcggtattgtcatccattttgctgatgcttgtagtaatctactatccgccgcttcagccgattttccatactgtagccatcacgccgggggactggatgctcgtcatcggtatgtccgccatccctacttttttgctggcggggtcacttttaacaagaaaaaaataaattcatatgatataatcttaggggtaatagcgtgtctattgcccttttattatgagaacagggaagaattgggtgttttaaaatgatacgaagtatgacaggcttcggcagtgcaagcaaaacacaagacgatctctctgtaagcgttgaacttaaatctgtgaactacagatttaaagaagtgaacgctcgtttgccaaggcctttgctatattttgaagataagctgaaacagaccattctgcagcatattcagcgcggaagaattgagcttttcgtatccgttgacagcgatatgcttgttgagaaaaggcttgaaattgattggccgctgctcgatgagtttgtcgcagccgcgagaggtatgaagaaacggtatcaattgtctgcagagcccgatgtaatggatttctttaagcttgatcatgtcgtccaggttcatgaagaacagacgcaaaatgacaagctggaggcgttgatcatcgatgctgcagaagaagcggtaaaaggtctctgtgaaatgcgtgaaaaagaggggctgctcttagcgaaagactgcctgatgcatattgatcagcttgaagagctggtgagagaaactgaattgctggctgcagatgtcgtatctcgttaccgggaacggctgtacgccagaatcaaagaatggactgaagacgtattagacgagagccggcttgtaacagaatgcgctatttttgcagaccgctctgatatcactgaagagattacaaggctgaagagccacttcgcccagtttcgtgatatattagctagtggcggagctgtcgggcgcaaactcgactttcttgttcaggagctcaatcgggaagcaaatacgattggctcaaaagcaaatgatcatcagatcacaaagcttgtcgttgaaatgaaaagttctattgaaaaaataaaagaacaagtgcaaaatatagaatagtgactgtgcgtattgtttacagacggtcttactaggctaaactagagacgtctattttacagggggaacgtagaagatgacgattaaactgattaatatcggatttggcaatatcatctccgccaatcggatgatttcgattgtcagcccggagtctgcgccaatcaaacggatgattcaggatgcaagagaccgcggaatgctaattgacgctacatacggacgaagaacccgtgcagttgtcgtcatggatagtgatcacattatcttatctgccgtccagcctgagacagttgcacacagactttctgttaaagaagaaattatggatgaagggcaggggtaattgccgcatgaaagaaagagggttattaatcgttctctcaggtccctcaggagttggtaaaggaacggttcgacaagcgatcttttcgcaggaagacacaaaatttgaatattcgatttcagtaaccacaagaagtccaagagagggcgaagtgaacggagtcgattattttttcaaaacaagagacgaattcgagcaaatgattgcggacaacaagctgcttgaatgggcagagtatgtcggcaattattacggcacgccagtcgattatgttgaacagacgcttcaagatggaaaagacgtctttttagaaattgaagttcaaggggctcttcaagtgagaaatgctttcccggaaggcctatttattttccttgcgcctccaagcctttctgaactgaaaaacagaatcgtgacacgaggcacagaaacagacgctctgattgaaaatcgaatgaaagccgcaaaagctgagatcgaaatgatggatgcttatgactatgtcgttgaaaacgataatgtcgaaacggcttgcgataaaatcaaagcaatcgttcttgctgaacatttgaagcgtgaacgcgttgcaccaagatataagaaaatgctggaggttgaataatcaatgttagatccgtcaattgattctttaatgaataaattagattcaaaatatacgctggtgactgtttctgcgagacgcgcacgtgaaatgcaaatcaaaaaagaccaaatgattgaacatacgatttcacacaaatatgtaggcaaagctttagaagaaattgatgcaggcctgctttcgtttgaaaaggaagaccgcgaatagtagcacaagtagcaacctatatcagatgtaggttgttatttttttccgtgcggttttgtaaagtgcagagggggagaattcattgctaaacaatcgaaatgtgttactttgcgtgagcggaggcatcgctgtttataaagcctgtgcgttaacgagcaagctggttcaggcaggagcaaatgtcaaagtgattatgactgaatccgcttgccgattcgtttcaccgctgacatttcaggcattgagccgccacgaagtctatacagatacatttaaagaacaaaatccaagcgttatttctcatattgatgccgcagactgggccgacttgattattgtagcgccggctacggctaatgtgattggaaaactggcaaacggcatcgctgatgatatgctgacgacaacattgttggcagcaacggctcccgtttggatcgcgccggcgatgaacgttcatatgtatgaccacccggcagtcaaacgaaacatttctgttctttatcaggacggttatcgttttattgagccaagtgagggctatttagcatgcggttacgtaggaaaaggcagattggaagagccggaaaacatcgtaaagctggccgaaaaacattttgctgaagaaacatccgctcctttagaaggcaagcatgtggtcattacagccggtccaacgcgggaagcgattgatcctgtccggttttttaccaataaatcgacgggcaaaatgggctacgcactagcggaggctgctgttcagctcggcgcacgggtaaccttaatttctgggcctgtttcacttgatcagcctaaaggccttgctgagtttatccctgttcaatcggctgcggatatgcgcgaagctgtgctctctgtgtatgacgcaagcgatatagtcattaaaacagctgcggtagccgattttacgccgaaaacagtatttgaccataaaatgaaaaaacaagacggcggcatgaccttagaactgaaaagaacagtcgatattttgaaagaattgggcgagaaaaagaaagagcagattttggtcggatttgccgccgaaacacaagacattgaacactatgcacgtaaaaagctcgccgctaaaaaccttgatttgattgtggcaaatgatgtgaaagcaaatggggccggttttggtgctgatacgaatatcgtgacaatctttttcaaagacgggcataaacgcgaactcccgatcatgtctaagctcgatgtttcttttgaggtccttcaggagatcgcagccctctcaaaacaaaccggagagcgctcatgaattttgcagaagtcatcgttgatgtcagcaccaaaaatatagacaggccttttgattataaaatcccagaccatctcaagggcatgatcaaaacggggatgcgggtcattgttccgtttggcccccgtaagattcaagggtttgtgacagcagtcaaagaagcatctgacctatcgggaaaatctgtcaaggaagtagaggatttattagatcttacacctgttctgacagaggagcttatgattctgtcatcatggctgtcagacaaaacgctgtcttttaaaataacggcgcttcaagcaatgctgcctgccgccttaaaggcgaaatatgaaaaagaattaaaaattgcacacggagccgatcttccgccgcaagtggaacggctgttttctgaaacaaagacgctgctgtattcagatatacccgatcatgagacgctgaaactgattcaaaggcatgttcaaaaaggggacattgacgtgacgtataaagtcgcgcaaaaaaccaataaaaaaatggtcaggcatattcaggcaaatgcgagtaaagaagagcttgctaagcaggctgagggattgtcccgccaagcagcaaaacagcaggcgattcttcactttctcatctctgagccggaaggtgtgaaaattcctgcggcggaattgtgcaaaaaaacggatacgagctctgcaaccattaaaacccttatccaaaaagggcttttgaaggaaagctatgaagaggtttacagagatccctatcaggacaaaatgttcaaaaaaacagagcccctgccgctgacagacgaacagagggctgccttcgagcccatacgcgagacattggacagcgatgagcataaagtgttcctccttcacggcgtgacaggaagcggaaaaaccgaaatttatctgcaatcaattgaaaaagtactggcgaaaggaaaagaagccatcgtcctcgtaccggaaatatcgctgacgccgcaaatggtcaaccgcttcaagggccgcttcggctcccaggtggcagtcatgcacagcggtttatccacaggagaaaaatatgacgagtggcgtaaaatccaccggaaggaagtacggcttgtcgtcggtgccagatccgccatttttgctccgtttgaaaatctcggaatgataatcatcgatgaagagcacgagtcttcctataaacaggaagaaatgccgcgctatcatgcgaaagaggtggcaatcaagcgggctgagcatcacagctgcccggttgtattagggagtgctacgccgacattagaatcatatgctagagcgcaaaagggcgtatacgagcttctttcactgaagcaccgtgttaaccatcgggtgatgcccgaggtttcgcttgtcgatatgagagaggagcttagaaacggcaatcgctcgatgttttcagttgaattgatggaaaagcttgaagaaacgattgccaagggtgagcaggcggtgctgtttttaaataagaggggctactcttcctttgtgatgtgcagggattgcggctatgtcccgcaatgcccgcactgcgacatttccatgacgtatcatcgttacggccaaaggctgaaatgccattattgcggacatgaagagcctgttccgcacacttgtcctgaatgcgcaagcgagcatatccgctttttcggaacgggaacacagcgagtggaggaagagctgacaaaagtgctgccaagtgcgagagtgattcggatggatgttgacacgacatcacggaaaggcgcccatgaaaaattactgtcagctttcggagaaggaaaagcggatattcttctcggaacgcaaatgatcgcgaaagggcttgattttccgaatgtcacgcttgtcggagtgttaagtgctgatacaacacttcatattcctgatttcagatcggctgaaaaaacatttcagctgttaacgcaagtcagcggccgggcaggcaggcatgaaaagcccggccatgtcatcattcaaacgtatacaccgtctcattacagtatccagctgacgaaaacacacgattatgaaacgttctatcagcatgaaatggcgcacaggagagagcaatcctatccgccatactactatttggctcttgtgactgtttctcatgaggaagtggcgaaagcagcggttacagctgaaaaaatcgctcattttttgaaagcaaactgcggagctgacacgaaaattctcggaccaagcgcgtcgccgatagccaggatcaaagatagatatcgctatcaatgcgtgataaaatacaaacaggaaacccagttatccgctttattgaagaagatactggaacattataaacgcgaaattgaacaaaaacatgtaatgatttcaattgatatgaatccttatatgatgatgtaagatctcacgtcttggagggtaacaaattggcagtaaaaaaggtcgtcacacatcctgcggaggttttggaaacacctgcggaaaccgtgactgtttttgataaaaagctaaaaaaactgcttgatgatatgtacgacaccatgcttgaaatggatggtgtcggactggcagcgccgcaaatcggcattttaaaaagagcggccgtcgtagatatcggggatgacagagggagaattgatctcgttaatcctgaaattttagaaaaaagcggcgagcaaaccggaattgaaggatgcttgagctttcctaacgtctatggtgatgtcacacgtgccgattatgtcaaagtgcgtgcgtttaaccgtcagggaaaaccgttcattctggaagcgcgaggctttttagcaagagccgtgcagcatgaaatggaccacttagacggtgtgctgtttacatctaaaataagtaaatactatacagaagatgaactagcggatatggaaggatgatttgatgacgagaatcgtatttatgggaacgccggatttttcagttcctgttttaagaaccctgatagaggacggatatgaagtagtgggggtcgtcacacagccggaccgtccgaagggcagaaaaaaagtactgacacctcctccggtaaaggaagaggcattgcgccacggcatcccggttcttcagccggaaaaagtcagattgacagaagaaattgaaaaagtgctggcattaaagcctgacctgattgtaacggcggcattcggacaaattttgcctaaagagcttctcgacagtccaaaatacggctgcattaacgttcacgcatcccttttgccggaactgcgcggcggtgctccgatccattattccattctgcagggaaagaagaaaaccgggattaccattatgtatatggtagaaaaattggatgcgggcgatatgatctcaaaagtggaagtggacattgaagaaaccgacaatgtcggaacactgcacgataaattaagcgttgctggcgcgaagctattgtctgaaacggttccaaacgttattgccggcagcatatcacctgaaaagcaggatgaagagaaagcgacgtacgcgcctaacattaaaagagagcaagagctgctcgactggtccagaacgggcgaagagctttacaaccagatccgcggcttaaatccatggcctgttgcttatacgactctaaacggacaaaacttgaaaatatgggcgtcgaaaaaaatagcggcaccaacaacagctgagcccggcacagtcgttgcagttgaaaaggaaggaattatcgttgcctcaggtaacgagacggctctgttattaaccgaactccagccggcaggcaaaaaacgaatgaaaggcgaagactttgtgcgaggcgctcatgttgaagccggtgatgtgttaggagtaaacaatgaaaaaaactagtgttcgtgacatcgcccttgaggcgctgatcaaattagaacaaaaccaggcatacagcaacctgctgctgaaatcggtcattaaatcaaatgaactgagtgatcaggacagagggcttttgactgaacttgtctatggtacattacaaaataagatcgcgcttgattatatgcttaaaccgtttatcaataagcctcaaaaggtaaagccgtgggtgattcagcttcttcgcctatccttatatcaaatggagtatttggagaagattccagacagggcagccattcatgaagcggttgagattgctaaaatccgtggacacaaaggcattgcttcatttgtcaacggcgtgctccgttctattcagcgcgaaggtgttccatcctttgacgcgatcgaagatcctgtccgccggctggcgacagaaacaagccatccggaatggcttgtgaaagagtgggcggatgcgtatggatttgaagctgcggaaaagatttgccgcatccatctcattccgccgaaacagacgctgcgtgtcaatcaaatgaaagcagacagagctgagctgcttgaccaaatggctgctgagggaatcgaagttgaaaaaagcgacctcgctgaagatgctgtgaagctcttaaagggaacaattgccggaactcatttcttccaaaacggcgaagtttctatccaggatgagagctccatgctcgtcgcccgcgcccttgatcctaagtcagatgaaacagtgcttgacgcgtgtgcggcgcctggcggaaaatcggctcatatcgcagaattaatgaagaacaaggggagcgttacgtcgcttgatcttcacaaacataaagtgaagctgatcaaagaagcggcagatcggcttggcctgacaatcattcatgcggaaacaatggatgctagaaaagcgggggaaacgtttgaaaacgaacagtttgaccgaatattggtcgatgccccgtgctcaggtttcggtgttatcagaagaaagccggacatgaaatacacgaaaaaacctgacgacagcgcccgtctagctgaaatccagctgtcgatcttgagggaaatcgcaccattagtaaaaaaaggtggcactcttgtctacagtacgtgtacaatggaccggacagaaaatgatgaagtaatacatgcgtttatacaagaacatcctgattttgaacccgatttgtctcttgaaaagcggctgcctgaaaaggtgagaccctttgttcgggatggaaggcttcaaatccttcctcattatttcggaacagatggtttctttatttgcagcatgagaaagaagggataagcaatggcagaacttaataaaacaaaagtaagaaaagaattgcggacagagcgtccgtctatttattcttttgaattagatgaaatcaaacaatggctgacagacaatggagagaaaccgttccgtgcagcccagatctttgaatggctatatgaaaaacgcgtatcttcttttgaagatatgacaaacctctcaaaggatctgcgtgagaaattaaacactcactttgtgttaacaacgctgaaaacggctgttaaacaaacctctcaagacggtacgatgaagtttttgtttgagcttcatgacggttataccatcgaaaccgttttaatgagacacgagtatggcaattctgtatgtgtaacgacacaagtcggctgccgtattggctgcacattctgcgcgtcaacgcttggaggcttaaaacgaaaccttgaagcaggggaaattgtcgctcaagtagtcaaagtgcaaaaagctcttgatgaaacggatgaacgcgtcagctctgtcgtgatcatgggaatcggcgaaccttttgataactttaacgaaatgctcgctttcttgaaaatcattaaccatgacaagggcctgaatatcggtgctcgccatattacggtctctacgagtgggatcatcccgaaaatttacgaatttgctgatcagcaaatgcagattaactttgcaatttctctgcacgcgccgaacacagaaatcagaagccgtttgatgccgattaacagagcatataaactgcctgatctaatggaagccgttaaatattatattaataaaacgggacgccgcatcagctttgaatacgggctgttcggaggcgtaaacgaccaggtggaacacgccgaagagcttgccgacttgctggaaggagtcaaatgccacgtgaacttgattccggtaaactacgtgcctgaacgggactatgtgcgcacaccgcgtgatcagatttttgcttttgaaaaaacgctgaaatcccgcggagtaaatgtcacaatccgaagagagcaaggacatgacattgacgcagcctgcggtcagcttcgcgcgaaggagcgtcaagacgagacgaggtgatgagggttgttaacagccttaaaaacagatacaggaaaaatccgccagcataatgaagatgatgcggggatattcaaggggaaagatgaatttatattagcggttgtcgctgatggcatgggcggccatcttgctggagatgttgcgagcaagatggctgtgaaagccatgggggagaaatggaatgaagcagagactattccaactgcgccctcggaatgtgaaaaatggctcattgaacagattctttcggtaaacagcaaaatatacgatcacgctcaagcccacgaagaatgccaaggcatggggacgacgattgtatgtgcgctttttacggggaaaacggtttctgttgcccatatcggagacagcagatgctatttgcttcaggacgatgatttcgttcaagtgacagaagaccattcgcttgtaaatgaactggttcgcactggagagatttccagagaagacgctgaacatcatccgcgaaaaaatgtgttgacgaaggcgcttggaacagaccagtcagtcagcattgacacccgttcctttgatatagaacccggagacaaactgcttctatgttctgacggactgacgaataaagtggaaggcactgagttaaaagacatcctgcaaagcgattcagctcctcaggaaaaagtaaacctgcttgtggacaaagccaatcagaatggcggagaagacaacataacagcagttttgcttgagcttgctttacaagttgaagagggtgaagatcagtgctaatcggcaagcggatcagcgggcgttaccaaattctccgcgttataggcggcgggggaatggccaacgtgtatttagctgaggatatcattctagaccgtgaagtcgcaattaaaatcctgcggtttgactatgcaaatgacaatgaatttatcaggcgtttccgcagagaagcccaatccgcatcaagcctcgatcacccgaatattgtcagcatttatgatttgggcgaggaagatgatatttattatattgtcatggaatacgttgaaggcatgacgcttaaagaatacataacagcaaatgggccgcttcaccctaaagaagcgctgaacatcatggagcaaattgtctcagccatcgctcatgcccatcaaaaccagattgttcacagagacatcaagccgcataacattttgattgatcatatgggaaatatcaaagtaacggattttggaattgcgacggcactaagttcgaccacaatcacccataccaattcagttctgggctcggtccattacttatcacctgaacaggcccggggcggcttagccacaaaaaaatcggatatttatgcgcttggaatcgttctatttgagcttttaaccggccgtattccgtttgatggagagtcagcagtcagcatcgccttgaagcatcttcaagcggaaactccttcggcaaaaaggtggaatccatcggtcccccaaagcgttgaaaacatcatactcaaggcaactgccaaagatccttttcatcgctacgaaacggctgaagacatggaagcagacataaaaacagcttttgatgccgacagactcaatgaaaagagatttacgattcaagaagatgaagaaatgacaaaagcgatacctatcattaaagatgaagaacttgctaaagctgctggcgaaaaagaagctgaagtgacaaccgcacaagaaaacaaaacaaagaagaacggcaaaagaaaaaagtggccgtgggttttgctcacgatatgcctcgtttttatcacagctggaattcttgctgtcactgtttttccgtcgcttttcatgcctaaggatgtcaaaatacctgatgtctccggaatggaatacgaaaaagccgcagggctcttggaaaaagaaggtttacaggttgattccgaggtgttggaaatctcagatgaaaaaattgaagagggcctgatggtaaaaacggatcctaaagcggataccacagtcaaagaaggcgccacggtcaccctttataagagcaccggaaaagcaaaaacggagatcggtgatgtgacaggccaaacggtcgaccaggcaaaaaaagcgttgaaggaccaagggtttaaacatgtaacggtaaatgaagtgaatgacgagaaaaacgcgggcactgtcattgaccaaaatccttcagcagggactgagcttgtcccgagtgaagatcaagtcaaacttacagtcagtatcggacccgaagacattacgcttagagacttgaaaacctacagtaaagaagcagcgtctggatatctggaagacaacggattgaagcttgtagaaaaagaagcatactcagatgatgttccagaaggacaggttgtcaaacaaaaaccagcagcaggtacggcagtaaagccgggaaacgaagttgaagtgacattctctctcggaccagagaaaaaacctgcgaaaacagtgaaagaaaaggtcaagatcccctacgaaccagaaaatgaaggggacgagcttcaagtgcaaatcgcggttgacgatgcggatcacagcatctctgacacttacgaagaatttaagataaaagagccgactgaacgaacgatcgaactaaagattgaacccggccaaaaagggtactatcaagtaatggtaaacaataaagttgtcagctacaaaaccattgagtatccaaaagatgaataacaaggagggaaaatatgcctgagggcaaaattattaaggcgctaagcggcttttactatgtactggatgaatcagaggattcagataaagtaatacaatgcagaggaagaggcattttcagaaaaaacaaaattacccctcttgtcggtgattacgttgtgtatcaagctgaaaatgacaaagaaggatatctaatggaaattaaagaaagaaccaacgagcttatcaggccgccaatttgcaacgttgatcaagcggtcctggttttctcagcggttcagccttctttcagcacggcattgctcgaccgcttcctggttctcgttgaggccaatgatattcagccgattatatgcattactaaaatggatctgattgaagatcaagatacagaagatacgatacaagcctatgcagaagactatcggaatattggttatgacgtataccttacctcctctaaggaccaagacagtttaacggacatcatcccgcattttcaggataaaacaacggtatttgccggtcagtccggtgttgggaaatcctcgcttctcaacgcgatcagtccggagcttggattaagaacaaacgagatttctgagcatttgggccgcgggaaacacacaacccgccacgtggagctgattcatacgtccggaggtttggttgcagatacaccaggattcagctcgcttgaatttacagacattgaggaagaagagctgggctataccttccctgatatcagagaaaaaagctcttcatgcaaatttagaggctgtttacatctgaaagagccgaaatgcgcggtgaaacaagctgttgaagacggagaattaaagcagtatcgctatgaccattatgttgaatttatgacggagattaaagacagaaagccgaggtattagcataatgataaaggttgcaccatctattctttccgctgattttgccgctttaggcaatgagattaaagatgtagaaaaaggcggagccgattgtattcatattgatgttatggacggccgttttgtcccgaatatcacaatcggtccgctgattgtagaagcggtccggccggtaacggatctgccgcttgatgtccatttaatgatagaagagccggatcgttatatcccggcttttgcgaaagcaggcgcagatatcctgtctgtgcatgctgaggcatgtccgcacctgcaccgtaccatccagctcattaaagagcaaggagtgaaggccggagtagttctaaacccgcatacccctgtacaagtcatcgaacatgttttcgacgatcttgatcttgttcttttaatgacggtgaacccgggcttcggcgggcagaaatttattcattcagtccttcctaaaataaaagaggttaagcgaatggcggatgaaaaaggaaaaaaagatctgttcattgaagtagacggcggcgtcaacaaagaaaccgctccgctcgtcattgaagcgggcgcaaatttactcgttgccggttcagctgtttatggccagtctgaccgcaaaaaagcaatttctgaaatcagaggaagtaaataagcagctttagaaaagagctgggcatacaatagcctaagctctttttcctgtatgcagagaaaggaatcagagatgaaaacaattaatatcgttgcgggaggcccgaaaaatctcattcccgatctaaccggctatacggatgaacacacgctttggatcggtgttgacaaaggcaccgtcactctcttagatgccgggatcattcctgttgaagccttcggagattttgacagcataacggagcaagaacgccggcgaatagaaaaagccgctcccgcccttcatgtgtatcaagcagaaaaagatcaaacagatttagacctcgcccttgattgggcgctggaaaagcagccggatattattcagattttcggcattacaggcggcagagctgatcattttttaggaaacattcagctactgtatagaggtgtaaaaacgaacataaaaattaggctgatagacaaacaaaatcatattcaaatgttccctcctggtgaatatgatattgagaaggatgaaaataagcgatatatctccttcataccgttttccgaagacatacatgagctgaccctgaccggttttaaatatcctctaaataattgtcatattacgctcggttcaacactatgtattagtaacgaactcattcattcacgaggtactttttcgtttgcaaaaggcatattaataatgataagaagcacggattaagcatgtgctttcattcaattgctaaaaacaatgaacaaggcggttacgggacgttataggaggggacaaaaatgaaattttacaccattaaattgccgaagtttttaggaggaattgtccgggcgatgctgggctcatttagaaaagattaatgcccaggggttcaaagccctctttcaccacataaaaacgcctgccacatatcggggcaggcgttcattttgttatacacgctcaactttaccggatttcaaagctcgagcagatacatatacttttttaggttttccgttcacaaggatacgaaccttttgaagattcgcgccccaagtgcgcttagaagcgttcattgcgtgagaacggttattcccagctgttgtttttttacctgtgataacgcatttacgtgccatttgtttccctcctcacttgcacaaaacatctactttttaacattcatataatcttagatgctttcgatatggatactttaaataatttaccacagctaaaaaacgtttgcaactattgtttcatcatctttcaagaaaattcacttgacatcttgcggaaacagcagcgctatagtatatgtagaggtacggccagcgattattgcctggtcttttcataatggaaaccatatagtagaatagctgtaactctatgcattcgaaggaggaactagtgtgtccattgaattaagaacgaagtacggacagattgatatatctaatgaagtcatcgcgatggttgcaggaggcgcggcggttgactgttacggcattgtcggtatggcctctaaaaaccagattaaagacggactgactgaaatccttcggaaagagaatttcagcaggggtgtccaagttcgccaagaaggagaacagatacatatcgacatgtatatcattgtcagctacggcacgaaaatttctgaagtggcacataatgtccaaacaaaagtaaagtacacagtaaatcaaaccatcggactggcagtggattctgtcaatatttatgtccaaggcgtacgagtgacgaacccgtagttaggaggagtaggattgtctatcagaacattagacggcagaacctttgccgagatgattcttgcgggagcgcagaatctgtctcaaaacgccagtgcagttgatgcactgaacgtgtttccggtgccggacggtgatacgggaacaaatatgaacctgtcgatgacttccggagcaagagaagttgaacaaatggatacggatgatatcgggaaggtgggctccgcgttatctaaagggctgctcatgggagcacgcggaaattcaggagttatcctatcccaattgttccgcggatttagcaaaagcattgaaacgaaaaaagaaattaatgcacttgagtttgccgctgcgctgcaagcaggtgtagacatggcgtataaagctgtcatgaaacctgtagagggcaccattttaacagttgcaaaagacgctgcaaaaaaagcgatgatcttagcagaaaaagaaaccgatatcactgcgctgatgattgcagtgacagaagaagcagaggcgtctttaaaccgcacccctgaattgctacctgtcctaaaggaagtaggagttgtcgatagcgggggcaaaggcctgctctgtgtgtatgaaggtttccttgcttcattaaaaggtgaaactgtacctcagaaagcagttcttccgtcacttgacgacatggtcagcgcagagcatcacaagagcgcgcaaagcatgatgaataccgaagatattgaatttggattctgtaccgaagtgatggttaggcttgatcagacaaaaagagagttcgacgaaggcacgttcaggcaagacctcagccagttcggagattctctgcttgtgattgcggatgaatcgctggcgaaggttcatattcatgctgaagagccgggaaacgtgttaaactacgcccagcattacggtgaattgatcaaaataaaaatagaaaatatgagagaacagcatacctctatcatcagtcaagaaagcaaacctgcagacaacgaaataccgccggcaaagcagccgtatggcattgtgactgtggcgatgggagaaggaatttcagacctattcaaaagcattggcgcttctgttgtgattgaaggcggccagaccatgaacccaagcactgaggatattgttgatgccgtgaagtctgtaaatgcagatacggtatttatcctgcctaacaactccaacattatcatggctgctaaccaagcggccagcgtagtggatgaacaggtttttgtcattcctgctaaaacggttccgcaagggatgtcagccctgctggcttttaacccggatcaagaagctgaagcgaacgaggccaatatgctaagcgccattcagcaagtaaaaagcggacaggtgacgttctcagtcagagatactcatattgacggtaaagatattaaaaaaggcgactttatgggcattctgaatggaacgattatcggcacttctgaaaatcagctgtcagccgcgaaaatgctgctgtcagaaatgatcggagaagatgatgaaatcgtgaccattctatatggtgaggatgcgtctcaggaagaagctgagcagcttgaagcgtttctcagtgaaaagtacgaggagattgaggttgagatccacaatgggaaacagcctctgtattcgtatatagtttctgcagaatagaagggcaatttgcccttctattcttatgtctgcttttaagtgcggcagcgctgtaacgcgcccgcttgccattttatatctgatcaattagtctagaagcaaagcgctaataagctctggttcataaggaggaatagcatgaaatacagaagcgtttttgatattatcggcccggttatgatcggtccgtccagctctcatacagcgggagctgctagaatcgggagagtggccagaagtttatttggcagagagcctgagcgcatcattgtatctttttacggctcgtttgcggaaacgtataagggccacggcacagatgtcgcgattatcggcggattgcttgattttgatacattcgatgaacggattaaaaccgctatacaaattgcagaagctaaaggaattgatatagagtttcgggtagaagacgcagtcccggtccatccgaacacagcaaaaatcaccatttctgatgaaaagggtgagcttgaactgacgggtatttcgattggcggaggaaagattgaaatcacagaattgaatggttttgagctccggctgtcaggaaatcatccggccatattagttgttcataatgacaagtttggcacaattgccggtgttgccaatgttctggcgaaattttcaatcaacgtaggacatatggaagtagcccggaaagatatcggccagcttgcgctgatgacaatagaggtcgaccaaaatattgacgaccacattctcgacgagctgtcgaaactgccgaatattattcaagtgacaaagattgctgactagcgaaaagggtcaggaggagccagttatgtttcgtaatgtaaaagaattaattgagattactaaagaaaaacaaatattgatctctgatgtgatgatagctcaagagatggaagtaacagaaaaaacaaaagaggacatttttcagcagatggatcataacctgtctgttatggaagcggcggttcagaaaggactcgagggagttacgagccaaacgggcttaacaggcggagatgccgttaaattgcaggcctatattcgatcaggaaaaagcctgtctggcccgctgattttagatgctgtatcgaaagccgttgcaacaaatgaagtaaatgcagccatgggaaccatctgtgcgacaccgactgcaggttctgccggtgtggtgcccggtacgttatttgctgtaaaagaaaagctgaatccaacaagagaacaaatgatccgctttttgtttacagccggggctttcggatttgtcgtggccaataacgcaagcatttccggcgccgccggaggatgtcaggcagaggttggatcagcttcaggcatggcggctgcggctattgttgaaatggcaggaggaacacccgaacaaagcgcggaagccatggccattacattaaaaaatatgctaggcctcgtgtgcgaccctgttgcagggcttgttgaggtgccttgcgtgaaacggaatgcgatgggcgcgtcaaatgcaatgattgccgctgatatggcattggcgggcattacaagccgtattccatgtgatgaggttatcgatgccatgtataaaataggccaaacgatgccaactgcacttagagaaacaggccagggcggtttagcggcaacaccgacaggaagagaattagagaaaaaaattttcggaggagcgctaggttcacgtgaaacaacatcagcaaactagtatagctaacattaagggtattgggccggaaacagaaaaaacattacacgaactcggtatttatgacatttctgatcttctgaattatttcccttatcgctatgatgactacgagctgagggatttagaagaagtaaagcatgatgaaagagtcacagtcgaagggaaggttcattcagagccttctcttacctattacggaaaaaaacgaaacaggctgacattcaggcttctggtcggccactatttaatcacagccgtatgttttaaccggccttatttgaagaagaagctttcgctcggctctgtggtgacggtttcaggtaaatgggacaagcaccgccaaaacatctctgttcaggagttgaaaaacgggccgcatcaagaagacaaaagcattgaaccagtgtattctgtgaaagaaaatgttaccgtcaaaatgatgaggcgctttattcagcaggcgctgacccaatatgcagactcacttcctgatcctcttccggaaaagctaagaaaaagctataaactgcctgactattatcaagcgttaaaagcaatgcaccagcctgaaacaagggaagcattaaagcttgccagacggcggtttgtttatgaagaatttttgttgtttcagttgaaaatgcaggcgttccgaaaggcggaaagagagcagacacaagggatacggcagcgtttttcaaacgaagaactcatgagatttatcaaaagcctcccgtttcccctcacaaacgcccagtcacgcgttcttcgcgaaataacagcagacatgtcttctccatacagaatgaaccgccttcttcaaggggacgttggatcaggaaaaacggcagtcgccgccattgcactgtatgccgcgatcctatccggataccaaggagcgctcatggtgccgacagaaattctggccgagcagcatgctgattcgctcgtttcgctatttgaaaaatgggacgtcagcgttgctcttttgacaagctctgttaaagggaagcggcgaaaagaactgcttgagcgtcttgcggcgggtgagattgatattcttgtaggaacccacgctttaatccaagacgaggtggagtttaaggcgctgagtctcgttattacagatgaacagcacagatttggagttgagcagcgcaaaaagcttcggaacaaagggcaggatcccgatgttctctttatgacagccactccaatcccaagaacattagcgatcacagtgttcggtgaaatggatgtatctgtcattgatgagatgccggctggacgaaagagaatcgagacctattgggtaaaacatgacatgctggatcgtatattggcatttgtcgaaaaagaattaaagcaaggcaggcaggcttatatcatctgtccgctgattgaagaatcagacaagcttgatgtgcaaaacgctattgacgtgtacaatatgctttctgatatttttcggggaaaatggaatgtcggccttatgcatggaaagctgcattccgatgaaaaagaccaggtcatgagagaattcagcgcaaatcactgtcaaattctcgtatcaaccactgttgtggaggttggcgtgaatgttccgaatgcaacgattatggtgatttatgacgccgaccgttttgggctatcacagcttcaccagctgcgcggccgtgttggacggggtgagcatcaatctttctgtattctgatggctgatccaaaatcagaaacagggaaagaacggatgaggatcatgtcggaaaccaatgacggtttcgagctgtctgaaaaggatctggaactgagaggtcccggtgatttcttcgggaaaaaacaaagcggaatgccggaatttaaagtggcggacatggttcatgattacagagcgcttgaaacggcaaggcaggatgctgcgaatcttgtggcttctgacgcgttctggaaggagccggaatacgctgtgttaagagatgaattgctgaagagcggagtaatggacggggaaaaattaagctgagtatcagaagtttttggtgttcagccagaaacaatcgttgcattccaatctatgaaattatatactactattagtacctagtcttaattgtccggatggtgtttagatatgagaagaaataagagagaacgccaggaattacttcagcagacgattcaagcaaccccctttattacagatgaagaactagcgggtaaattcggggtgagcatccagacgatacgtttggaccgcttagagctttccatacctgaactgagagaaagaattaagaacgtggcagagaaaacacttgaggacgaagtgaagtccctgtcacttgatgaagttatcggagaaattattgaccttgagctggatgatcaggcgatatccattttagaaataaaacaggagcacgtgttcagccggaatcagattgcgagaggacaccatttatttgcacaggcgaattctttggccgttgcagtcattgatgacgagctggcgctgactgcaagtgcagacatccgctttacaagacaggtaaagcagggtgaacgtgtcgtagcaaaagcgaaagtgacggctgtcgaaaaaggaagaacggttgtcgaagtgaacagctacgttggcgaagaaattgttttttctggacgctttgacatgtatcgttcaaaacattcataaaggtggagcatgcatgagaatagctgtagatgcaatgggaggagaccacgctcccaaagctgttattgacggagttataaaaggtatagaggcatttgatgatctccatatcacacttgtcggtgacaaaacaacgatagaatcacatttaacaactacatcagatcgcatcacggtgctgcacgcagatgaagtgattgagcctacggatgaaccggtccgtgccgtgcgaagaaaaaagaactcatctatggttcttatggcgcaggaggttgcggaaaacagagctgacgcctgcatttcagcaggaaataccggtgcattaatgacagccggtctctttattgtcggaagaattaaaggaattgaccgtccggcgcttgccccgacacttccgactgtttcgggagacggatttcttctccttgatgtcggcgccaatgtcgatgccaaaccggagcacctcgttcaatatgccatcatgggttctgtttattctcagcaagtgcgcggtgtcacttcaccgagagtcggacttttaaatgtcggaacagaagataaaaaaggaaacgaactgacgaagcagacgttccaaattttaaaagaaacagcaaacatcaattttatcggaaacgtggaagcgcgagaccttttagatgatgtggcggatgttgtagtaacagacggctttaccgggaatgttacactcaaaacgctggaaggctctgcgttgtcaatttttaaaatgatgagagacgtaatgacgtctactttgacatccaagcttgcagcagctgtgctgaaaccaaaattgaaagaaatgaaaatgaaaatggagtattcgaattatggcggagcaagtctttttggcttaaaagcgcctgtgatcaaggcgcacggctcttcagattcaaatgctgtattccatgcgattcggcaagcaagagagatggtcagccaaaatgtggctgcgctcattcaggaagaagtgaaagaagaaaaaacagatgagtagtctggaggtttttacatcatgagtaagattgcatttttattcccgggtcagggatcacaatttatcggcatgggaaaagagctttatgagcaggtgcctgctgcaaagcgtctgtttgatgaagccgatgaaacgttggaaacaaaactcagctcgcttatttttgagggggatgctgaagaattaacacttacatacaatgcgcagcctgctttgcttacgacaagcatcgctgttcttgagaaatttaaagaatctggcattacacctgatttcacagcaggacacagccttggtgaatattctgcactggttgcggctggcgctctgtctttcaaagatgctgtttatactgtcagaaagcgcggagagtttatgaatgaagcggtgccggctggcgaaggagcaatggctgcgattctcggcatggatgctgaagcattaaagcaagtaaccgataaagtcacagaggaaggcaaccttgtacagcttgcgaatctcaactgtcctggccaaatcgtcatttccggaacagctaaaggggttgagcttgcatctgaactggcaaaagagaacggcgcaaaacgcgcaattccgcttgaagtaagcggtccgttccattctgaactgatgaaaccggctgctgaaaagctgaaagaggtattggacgcctgtgacataaaagacgctgccgttccggtcatctcaaatgtttctgctgacgtgatgactgaaaaagcagatatcaaagaaaaacttattgagcagctttactctccggttcgttttgaggaaagcattaacaagctgatcgcagagggtgttacgacttttattgaaatcggtcccggaaaagtgctttcaggccttgtgaaaaaagtgaatagacggttaaaaacaattgctgtatcagatccggaaacgatcgagctggcaattcaaacgcttaaggaggagaatgataatgcttaatgataaaacggctattgtcactggcgcatcccgcggaatcggccgctcaatcgcccttgatctggcaaaaagcggagcaaatgttgtcgtgaactactccggcaatgaagcgaaagcaaatgaagtggttgatgaaatcaaatcaatgggcagaaaagcaattgctgtcaaagcggatgtatcaaatcccgaagatgtacaaaacatgataaaagaaacattgtctgttttttctacgattgacattctggttaataatgcgggaattacaagagacaatctcatcatgagaatgaaagaagatgaatgggatgatgtcattaacattaacctgaagggtgttttcaactgcacgaaagctgttacaagacaaatgatgaaacagcgttcaggccgcattattaacgtatcgtctatcgtcggcgtcagcggaaaccctggacaagccaactacgtggctgcaaaagctggcgtcatcggtttaaccaagtcttctgctaaagagctcgccagccgaaatattacggtaaacgcaatagcgccaggatttatctcaactgatatgacagataaacttgcaaaagacgttcaagacgaaatgctgaaacaaattccgctcgcgcgctttggtgaacctagcgatgtcagcagtgttgtcacgttcctagcttcagagggagcccgttatatgacaggccaaacgcttcatattgacggcggaatggtgatgtaagttttttctcgaaaatttcatcgtagtttctctagttttttaaaaacgaatccactataatacttgaggggaggtgaattgctatggcagacacattagagcgtgtaacgaaaatcatcgtagatcgccttggcgttgatgaagcagacgtcaaacttgaagcttctttcaaggaagacttaggtgctgattccctagatgtagttgagcttgttatggaacttgaagacgagtttgatatggagatttctgacgaagatgctgaaaagattgcaacagtcggcgacgctgtgaactacatacaaaaccagcaataagctgatgctaaaagtcccgccgaaacgcggggctttagccctttattcgtgcagttattacagcatgccgcttttacgcgcgctgtatccggtttagtcagagaagcgcggtgaacctgatgtgcctatggaggttactatgtcaaaacactcacattataaagataaaaaaaagttctataaaaaagtagaacaatttaaagagtttcaagaacggatttcggttcactttcaaaatgaaaagcttttgtatcaagcatttacacattcatcttatgtgaatgagcatcggaaaaagccgtatgaagataatgaaaggcttgaatttttaggtgacgctgttttggaactgacgatctccagattcttatttgccaaatacccggctatgagtgaaggagatttgacgaaattgagagccgcaattgtttgcgaaccgtctctcgtttcattggctcacgagctgtcattcggcgatcttgtcctgttgggtaaaggcgaggaaatgacaggcggaagaaagcgtcctgctctattggcggatgtttttgaggcatttatcggagccttgtaccttgaccaaggattagagccggtcgaaagtttcttaaaagtttatgtgttccctaaaattaacgatggtgctttttctcatgtgatggatttcaaaagccagctgcaggaatacgtgcagcgggacggcaaaggctctctggagtataaaatctccaacgaaaaaggacctgcgcacaaccgtgaatttgaagccatcgtatctctaaaaggtgaaccactcggagtcggaaacggccgttcaaagaaagaagccgaacagcacgctgctcaggaagctttagctaaattgcaaaaacaccatacgaaacaataaaatcccccttatgactcagggggatttcagtatgtatgccgtcttatttgaccaatgtttatgatagaattgaaatacttattacataaggaggatcgctatgttcctcaaacgtttagacgttataggatttaaatcatttgcagaacggatttccgtagacttcgttaaaggcgtgacagcagttgtcgggccgaacggaagcggaaaaagcaacatcacggatgccattcgctgggttctcggcgaacaatcggcacgctctcttcgcggcggaaaaatggaagacatcatttttgccgggagtgattcaagaaagcgattaaatctagctgaagttacgcttactcttgataatgatgatcatttcttgccaattgacttccacgaggtgagtgtcacaagacgtgtgtacagatcaggtgagagtgagtttctgattaacaatcagccatgccgcttgaaagatattattgatttatttatggactctgggcttggtaaagaagcattttctattatcagccaagggaaagtggaagagatcctgagcagtaaagcggaggatcgccgcagtatctttgaagaagcggccggggtgcttaaatataaaacgagaaagaaaaaagcagaaaataaactgtttgagacacaggacaatctaaatcgggtagaagatatattacatgagcttgaagggcaggttgaacctcttaaaattcaagcttcaatagcgaaagactaccttgagaaaaagaaagagctggagcatgttgaaattgcgctgactgcctatgatatcgaagagctgcatggtaaatggtcgactcttaaagagaaagtgcagatggcaaaagaagaagagcttgctgaatcgtctgctatttctgcgaaagaagcaaagattgaggatacaagggacaaaatacaagcgcttgatgagtcagtagatgagctccagcaagttttactggtaactagtgaagagctggaaaagcttgaaggccgtaaagaagtcctgaaagaacgaaagaaaaacgctgtgcaaaaccaagaacagcttgaagaagccatcgttcagttccagcaaaaagaaacggttctgaaagaagagctttcgaagcaggaagctgtcttcgaaacgcttcaggctgaggtgaagcagttaagggcgcaagtaaaagaaaaacagcaggctctcagtcttcacaatgaaaatgtcgaagagaaaatcgagcagctgaaaagtgattattttgagctgttaaacagccaggcttcgatacgcaacgaactccagcttcttgatgaccagatgtcccaatccgctgtcacattgcagagactcgcggacaacaatgaaaagcacctgcaggaacggcgtgatatttctgcgcgtaaagccgcatgtgaaacggaatttgcccgaattgagcaggagattcacagtcaagtcggtgcatatcgtgatatgcagacaaaatatgagcagaaaaagcgccaatacgaaaaaaatgaatccgctctgtatcaggcataccaatacgttcagcaagcgagatcaaaaaaggacatgcttgagacgatgcagggagatttctccggcttttatcaaggtgttaaagaagtgctgaaagcgaaagagcgccttggcggaattcgcggagcggttcttgagctgatttctacagaacagaagtatgaaacggccattgaaatagcgctcggcgcttctgctcaacacgtcgtgaccgacgatgaacaatctgcccgaaaagcgattcaatatttaaagcagaattccttcggccgggcgacgtttctgcctctttctgttattagagaccgccagcttcaaagccgtgacgcggaaacagccgcccggcattcatcatttctcggggttgcaagtgaacttgtcacatttgatcctgcgtatcgaagcgtcatccagaatcttcttggaaccgttctgatcacagaggacttaaagggtgcaaacgagcttgcgaagcttctcgggcaccggtaccgcatcgtaacccttgagggagatgttgtgaaccccggtggttcaatgacgggcggcgcggttaaaaagaaaaataactccctcctcggaagaagccgggagctagaagatgtgacgaaacggctcgctgaaatggaagagaaaacagctctgcttgaacaagaggtcaaaacccttaaacaatccattcaggatatggagaaaaaactggctgacttaagagaaaccggggaaggcttaaggttaaagcagcaggatgtgaaaggccagctgtacgaacttcaagttgccgagaaaaatatcaatacccatttagagctctatgaccaagaaaaatctgctctgtcagaaagcgatgaagagaaaaaagcgcgcaaacgcaagcttgaagaagagctctctgccgtatctgaaaagatgaaacagcttgaagaggacatagacaaactgacaaaacaaaaacaaacgcaatcctcaacgaaagagtctctttccaacgagcttactgagctgaagatcgctgcggccaaaaaagagcaggcatgcaagggggaagaggacaaccttgccagattaaagaaagagctcactgaaacagagattgcgttaaaagaagcaaaagaagacttaagcttcttaacgtcagagatgtcatctagcaccagcggcgaagaaaagctggaagaagcagcaaaacataaattgagtgacaaaacgaaaacgatcgaactgattgcattaaggcgcgatcagcgcatcaagcttcagcatgggcttgatacgtatgagcgtgagctgaaagaaatgaaacgcctgtataaacaaaaaacaacgctcttaaaagacgaagaagtcaaactcggacgaatggaagtcgagcttgataatttactccaatatttacgggaggaatacagcttgtcctttgagggggcaaaagagaaatatcagcttgaaactgatccagaggaagccagaaagcgcgtgaagctgattaaactcgcaattgaagagctgggtaccgtgaacctcggaagcatagatgagtttgagagggtcaacgaacggtacaagtttctgtcggaacaaaaagaagatttaacagaagcgaaaaataccttgttccaagtgattgaagaaatggatgaagaaatgacgaagcgctttaacgacacattcgttcaaatccgctcacactttgatcaagtttttcgctccttattcggaggagggcgagctgaactgaggctcaccgatcctaacgatctgcttcattcaggagtcgagattatcgctcagccgccggggaaaaagctgcaaaacttaaacctcctgtcaggcggagagcgtgcgcttactgctatagcgctcttattctcaatcctaaaggttcgtccagtgccgttttgcgtccttgacgaagtagaggctgcgctcgacgaagcgaatgtgttccggtttgcgcagtatttaaaaaaatacagcagtgatacccagtttattgtgattacccacagaaaaggaacgatggaggaagcggatgtgctttatggcgtaaccatgcaggaatccggtgtttccaaggtaatctccgttaagctggaagaaacaaaagaattcgttcagtaacgaggaaagaggttaaaagatgagcttttttaaaaaattaaaagagaaaatcacaaaacagacagattccgtatctgaaaagtttaaggatggccttgaaaaaacaagaaactcctttcaaaacaaagtgaatgatcttgtatcccgttaccgtaaagtggatgaggatttcttcgaagagcttgaagaggttcttatcagcgcggatgtcggttttacaaccgttatggaattaatagatgagctgaaaaaagaagtcaaacgcagaaatattcaagatccaaaggaagtccagtcagtgatttctgagaaactggtcgagatttataacagcggagatgagcaaatttcagaactgaacatccaggatgggcgtttaaacgtaatccttctggtaggtgtaaacggtgtcgggaaaacaacaacgatcggaaagcttgctcataaaatgaaacaagaaggaaaatctgtcgtacttgccgccggagacactttcagagcgggagccattgaacagctggaagtatggggagagcgtacaggagtgcctgtcattaagcagacggccggaagcgatccggcagctgtcatctacgatgctgttcatgctgcgaaagcaagaaatgccgatgtattaatttgtgatacggcagggcgtctccaaaacaaagtaaatctcatgaaagagcttgaaaaagtaaaacgtgttatcgaaagagaagttcctgaagctccgcatgaggtgctgcttgcccttgatgccacgaccggccaaaatgcaatggctcaggcaaaagaattctctaaagcaacaaatgttaccggcattgctttaacgaagcttgacggtacggcaaaaggcggtatcgtccttgcgattcgcaacgagcttcacatcccggttaaactagtcggtttaggagaaaaagttgatgaccttcaggaatttgatccagaatcctatgtgtacggactcttttcagatttagtggaaaaagccgacgattaagaaaaaggccccaacatcttggggcctttttcttttttatcttcttacttgataggcgaaatgataaaggctgttatcagtggataccagtcttgactcaccagaaaaaactctgaatgggatgatgtcatagtaatgaacggaaacagatgtgtaatacgtatagtaaccagcagctggccccaaatacattggaacctcaaatgttccgtttgcatcagttgttcctgaagcagtttgtgttgtgtttccgaccttcgtgtccgcttcaaatcttacgggcgcgtttggcactggctgtccgttttggtcgagtaatttgccgcttactgtaatattgtacttgactcgccaatattgaccttgcccgtaattgattttaccgtatacccctccatctgtgctgatatttgtgattgaggccttataaggtgcctcagcagcgtctgcttgctgtgccgggaaacctattgtaaacagggctgccagacacaacataaacaataaaccgatttttttcataaaaatcctccttaaaatagggttcatatacaatatcggaataaattggatgatatttagcgtattttggaaaaggttaatcgtcgctttgacaagataaaaacttgacagtgtcaataaaaccgtgtaaactaagttatcgtaaagggatttgacttaacaaaggggagagctcaaatgtcactcgaaaagacaacgagaatgaattatctgtttgatttttatcagtcgttgttgacgtcaaaacagaagagctatatgtcgctttattatttggacgatttctccctaggcgaaatagccgaagaatatgaggtttcaagacaagctgtttatgataacatcaaacgaacagaagcgatgcttgaacaatatgaagaaaagctgctccttttgaaaaagtttcaggagcgtaaagagatgtttaataagctgaaggagcttgcttccggttcaaaagaagaggaagaaattacagctctgattgaagcgcttgagaaattagattaggaggcggcaaactatggcatttgaaggattagccgaccgactgcagcagacgatttctaaaatccgcggaaaagggaaagtcagcgaacaagatgtaaaagatatgatgcgtgaggttcgtcttgcgctgcttgaggctgacgttaactttaaagtagtcaaagattttgtcaaaaaagtaagtgaacgcgctgtaggccaagacgtcatgaaaagtctgacgcccggccagcaggtcattaaagttgttcaagaggaactgactgagctgatgggcggcgaagagagcaaaatcgccgtcgcaaaaaggccgccgactgttattatgatggtcggtctccaaggtgccggtaaaacgacaacaagcggtaagcttgcgaatctgctgcgcaaaaagcataatcgcaaaccgatgctggttgctgccgatatttaccgcccagccgcaattaagcagctggaaacactcggcaaacagcttgatatgcctgttttttctcttggcgatcaggtcagtcctgtagaaatagctaaacaggctattgagaaagccaaggaagaacattatgactatgtcattttggatacggcaggccgcttgcatatcgaccatgaactgatggatgaactgaccaacgtcaaagaaatcgcgaatccggaagaaattttcctggttgtcgattcaatgaccggtcaggacgctgtgaatgttgccaaaagctttaatgaacagctcggtttaaccggtgttgtgttaactaagctggatggagacacacgcggcggggctgcgctttctattcgcgctgtcacaaacacgccaattaagttcgcaggtttgggcgaaaagcttgatgcgttagagccgttccaccctgaacgcatggcatcaaggattctcggcatgggcgacgtgctgacattgattgaaaaagcacaggccagcgttgatgaagacaaagccaaagagctggaacaaaaaatgagaacgatgagcttcacattggacgattttctggagcagctcgggcaagtcagaaacatggggccgcttgatgagcttctgcaaatgatgccgggtgcaggtaaaatgaaaggcctgaaaaacatccaagttgatgaaaaacagctgaatcatgtggaagcaatcattaaatcaatgactgttcttgaaaaagaacagccggatatcatcaatgccagccggcggaagcggattgcgaaaggaagcgggacatccgtacaggaagtcaaccgtctgcttaagcagtttgatgaaatgaaaaaaatgatgaagcagatgacaaacatgtcaaaaggcaagaaaaaagggtttaagctaccttttatgtaatcggttatacatgataaaaccgttgttaagaaaaaacactttacaaacacttttatcattgttaatatactatcttgttgaaatattttcggaggtgctagtaaaatggcagtaaaaattcgtttaaaacgtatgggagcaaaaaaatctcctttctatcgtattgttgtagcagattctcgttcaccacgtgacggccgtttcatcgaaacagtcggaacttacaacccggttgcaaaaccagcggaagtaaaaattgacgaagagcttgctcttaaatggcttcaaactggagcgaaaccatctgatacagttcgcaacttgttctctagccaaggaatcatggaaaaattccacaacgctaaacaaggcaagtaatgactgatcaacacttggaagatttgattgtccacattgtgacgccgcttgttgatcatccagatgacattcgcgtcataagagaagaaaccgatcaaaagattgcgctgcgcttatctgtccataagtcagataccggtaaagttatcggaaagcaaggccggactgcaaaagcgattcgaacagctgtatttgcagctggcgcacagtcttctaagaaagttcaatttgaaatatttgactaaaagggagagggccggcacctcccctttttttacacgcaaaaaaagggtaaactgatagaagcttaggcaaaatagaaaagcctgggcgagtaaaagttttaaaagcggggagcttggtgcgatgcaaattattcaccgtgtagccgttatgcaagtcttaaccgagcgcagtaaagaaaagcttttagcttcttttgccgaaaagaaacaaatgcttgaacgagaatgcagccagctctattttcagcttagaaaacatgagaaagaacagcaaaaccctgatatgatagaacaatttaaaaaggcaatagaaaagcgaaaagatgatatgaaaatcatcgattttcaaattgctcaagtacatacattgcagcttggcagtgagttgaaagaaaaggaagtcgatgcgctgctgacgattgaagccggggatgactggcatgagaaaacagcagcgaacaccatcgtcataaaagacggaaaagtaattgaaattcgccagaggtgatcatatgacaaagcgatggtttaatgtaggcaaaatcgtaaatacccacggaatcaaaggcgaagtgcgggtgatttcaaaaacagattttgccgaagaacgatacaagccgggaaacacgctgtatttgtttatggacggccgtaacgaaccagtggaggtaacggtaaacacacatagactgcataagcaatttcatctcctgcagtttaaagaaagacaaaacctaaatgaagtagaagagctgaaaaacgcaatcattaaagttcctgaagaagaattaggagagctgaatgagggtgaattttatttccacgaaattattgggtgtgaagtatttactgaagaaggcgaactcatcggaaaggtcaaagaaattttgacgcctggagccaatgacgtttgggtcatcggacgaaaaggaaaaaaagacgcactcattccttacattgaatcagtggtcaaacatatcgatgtcagggaaaagaaaattgagattgaactcatggaagggttaatagacgaatgaaaatcgactttttgacgctgtttcccgaaatgtttgaaggcgtgctcggctcatcgattcttcaaaaagcccaggaaaaagatgcggtgcagtttcaagtcgtaaatttccgggagtactctgataacaagcacaatactgttgatgattatccttatggcggcggggcaggcatggttctcaagccccagcctgtttttgacgcggtcgaggacctgacatcaaaggcagccgctgctccgcgtattatcctcgtatgcccgcaaggtgagcgttttacccaaaaaaaagccgagcaattagcaaaggaagagcatttgctgttcatttgcggccattatgaaggctatgatgaacgcattcgcgagcacttggtaacggatgaaatatcaattggcgactttgttctgacgggcggtgagctccctgcaatgatgatcgcagacagtgtggtcagactgcttccgggtgtactgggtaaagaggcttcccatattgaggattccttcagcaccggacttttagagcacccgcattatacaagaccggcagattacaaaggtttaaaagtgcctgaaacactcttgtcaggaaaccatgcaaaaattgaagaatggcggaataaagaatcgatcagaaggacctacctaagacgtccggatctgttgaaagactacccgcttacagagcagcaaagaaagtggatttctgaatgggaaaaagaatagattttattgcataggctatgaaattgtgataagatactacttgtggcttaagcgggcttatccgctgcaagcttgaaaacgatgttccgctgtgccggtttttgtggccaagagcatctgttggaaggagttgaaaacgatgcaaaaactaattgaagatatcacaaaagaacagcttcgtactgatcttcctgcgttccgtcctggtgacactttacgtgtacacgttaaagttgttgagggtaaccgtgagcgtatccagatctttgaaggtgttgtgattaagcgtcgtggtggtggaatcagcgaaacgttcacagttcgtaagatttcttacggtgttggcgttgaacgtactttcccagtacacacaccaaaaatcgcgaaaatcgaagttgtacgttacggtaaagtacgccgtgctaaactttactacctgcgtgaacttcgcggaaaagcggctcgtattaaagagatcagacgataatgataacgaacgaaaagagcttgttacctgtaacaagctctttttttatacagaatttgaaaatgccggacaggcatcgtaaaatacataaaggacaacaatgaatcatgcatactgaagataaaggcggtgttcgtgtcacatgacaattcaatggttcccgggccatatggcaaaagcaagaagggaagtaaccgaaaaattaaaattaatcgatatcgtatatgaattggtagatgccagaattccaatgtcatcaagaaacccaatgattgaagatattctaaaaaacaagccgcgaattatgctgttaaacaaggctgacaaagcagatgcggcagttacacagcagtggaaagagcactttgagaagcaggggatccgctctctgtctattaattctgtaaatggacaagggttaaatcaaattgtgcctgcatcaaaagagatcctccaagaaaaatttgaccggatgcgtgcgaaaggtgtgaagccgagagcgattcgcgctttgattatcggcattccaaacgtcggaaaatcaacactcatcaaccggcttgcaaagaaaaacatagcaaaaacgggagacagacctggtattacaacctctcaacagtgggtcaaagttgggaaagaattagagctattagatacaccgggaattttgtggcctaaatttgaggatgagcttgtcggtttgagactggcagtcaccggggctattaaagactcgattatcaatttgcaggacgtggccgtgtttggtcttcgttttctcgaagaacattacccagaacggctcaaggagcgttatggccttgaggagatcccagaggacattgccgagctgtttgatgcaataggtgaaaagcggggctgtctcatgagcggcgggctcattaactacgataagacgactgaagtcatcattcgcgatattcgcactgaaaagttcggcaggctgtcatttgaacagccgacgatgtaaaggcgcgcagaaatgcgggtctttattttttcttggctgaaccgatacatacagtaagggagaagagaaagtgaatacattaaccgtaaaggacattaaagaccgtttgcaggaagtgaaggatgcacaagacccatttatttcccaatgcgaaaacgacccgagaaaaagcgttcaaacgcttgtagagcaatggcttaaaaagcaagcgaaagaaaaagcgctgaaagaacaatgggtgaatatgacttcctatgaaaggctggcaagaaacaaaggatttcgcttgattgcaggtgttgacgaggtcggccgggggccattggcaggaccagttgtcgccagcgcagtcatccttccagaggaatgtgaaatacttgggctgacagactccaaaaagctttcagagaaaaaacgcgaggaatattacgagcttattatgaaggaagcactggcggtcgggataggaattgtagaagctactgtgattgatgagatcaatatatatgaagcttcaaaaatggcaatggtgagagcgatacaggatttgtcggatacacctgattatttgcttgttgacgcaatgacacttccgctcgacacggctcaggcgtcaattataaaaggcgatgccaaaagcgtgtctattgcggcaggtgcgtgtatcgcaaaagtgacgagggaccgaatgatgagcgcttatgccgaaacgtatcccatgtacggctttgaaaaaaataaaggctatgggacaaaagaacatttggaagctctcgctgcatacggcccaactgaattgcaccgcaaaactttcgctcctgttcaatctttcagataaatcaccatggacaaggaggcacctttttaaaatgaacatacgaaatgatgtgcaaaaggcgctgcagcaccttttcgggcgtacagccgtcccgcaggaaacatcaaaagtaaacgaagcgctaaacggggagaagcgtctcctcttaggaaaagtgcttcgtttactaggagatcagcatgccctgatccaagtcggcaatcaaactgttcagggaaaacttgaaactcagcttcgtcctcaggcatactattggttttcctacgaaaaaaaaacggcagagcaaacaggccgtcttcaggtcgttcaaagctttgatcaaaatcctaaaaccattcaggatgcagctggcaaacttttaaatgctatttcagtgaagacgtcaaacgcagctctcatgatgacaggagcgatgctgaaaagcaaaacacccgtaacagaaaatgatatcaaaacagctgtccgctggatggacacgctgccttcgcaagacacaaaaaaagcagttgaaacggttctcttcgctttaaagcgtgatcttcccattcactccgagattttgaatggtgttcacgctgtgaaatcgcctgttccgttgcatcagcacgtatcccagctgctacaggcaatcgaccaaaaccctcagcagagccaaatgatgtcaaagctaaaggaagcagttacggtgcttttaaatagtgaaatcgatgtccatgcagaacggctgattgataagcttatttctttaaccgacaatacgaaagcaccttctccgacgaatacagctggaagcagggagcttagcacaccagctggctcccccggaaaagccagcctgccgattgcaaatcacacagcagaacagggaagcatacaagaagagcctgttaaaacagcagcagacattccaattaaagaagcccgccagctgctcgtgaagctgacggaatctgctgaaaaaaacagtctccaaattgtgaaagaagcagcaaattggattaaagcggctgcttcatcgggtgatagtaagtcacttgcagcttcagctgttttacaagcggcacaagtcacagaccaggaagccgaagtctttttaaaggctgttcagcagacagcaccccatttggcggataaggcagatgttctttctttcttatccaaagtgaaaacggcaatcggcgcaagggacgaggttgcgttcattaaagcgtttgaacaaggaagcgcagtcacatctggcgaaatgcaatccatcaagctggctctttctgccttaagagcatcgcatgaggtagccgaaccagtcaaacaagaagccgatcagctttttcataaattaaatggccagcttttcatgcagcaggaccatccatcatacagccaaattgtaatgtcatttccgatgttttcgaagtcaggggttcaggacatgactgttctgtttaaaggaaagaaagaagcggatggaaagcttgatccttcccattgccgccttttgtttttgctgcagcttgatacactaaaagaaaccgtcgttgattgcttggtacagcaaaaagtcatgaccattacaatagagactgatttcgagctgcaggctgcgatcgatccgatggtgcccgcgcttaaacaggggctaaaggaaatggggtacagcctttcaggggtaaacgctaaaaaaagggttcacaccgaagaaaaggcttcaatcgatcaatatataacaagtatcagtgatcaggaagtggatgtgaaaatatgaaagagcagacaccgatcagaaaagctgttgctctccattatgacgaacaaaaagacaaggcgccgagagtgattgccacagggaagggccatgtagctgacaacattatcaaagaagcgaaaaaagcaggggtcccgattcaagaagatcggacccttgtcgaattaatgcgccatttgacggtagatgatcaaattcctgaagctctttatgaaacggtagccgagattttttcattcatttacaaattggacgaaagcgtaaaaaacgaaaaatagctaaaatattccccatcctcctttgaaatttatgtttttaataaagtaaaagtttgaatgtttagaaggattaaaagattttgcatcgaactgtagacaattcttccagtattattatagaatgaaagcgcagtctattttagttttgttacataagttaggaggatgggaaatgaatatccatgagtaccagggaaaagaagtcctcagaaaatatggggtatctgttcctgaaggtaaagtggcttttacagcagaagaagcagttgagagtgcaaagagcttatccagctcggtttatgtcgtaaaggctcaaattcatgctggcggtcgaggcaaagctggtggggtaaaaatagcaaaatcattagacgaagtaaaagcgtatgccgaagaactattagggaagaccctagttacacatcagacgggtccggacggccaagtaataaaacgcttacttattgaagaaggctgcgatattaaaaaagaatattacatcggtctagtgcttgaccgcgccacttcaagaatcgttttgatggcttctgaagaaggcggaacggaaattgaagaggttgcggagaaaacaccggaaaaaatcaaaaaagctgtcattgatccggctgttggccttcaaggctatcaagccagagaaattgcattcgctattaatattccaaaagagctcgtgggaaaagctgctaaatttatgcttggactatataaagcgtttgttgagaaagactgctcaatcgccgaaatcaatccgcttgttgttaccggcgacggaaatgtgatggcgcttgatgcaaaattgaattttgacagcaatgcgttgtaccgacaaaaggacattatggaatacagagatttggatgaagaagatccgaaagaaattgaagcgtccaaatatgatctaagctacatttcccttgatggaaatatcggctgtatggtaaacggcgcggggcttgcaatgtccacgatggatattatcaagcattatggaggagaaccggccaacttccttgatgtgggcggcggtgcaaccgctgaaaaagtcacggaagcatttaaaatcattctttctgatcaaaacgttaaagggatttttgtcaacattttcggcggcattatgaaatgtgatgtcatcgcagaaggggttgttgaagcgactagacaagttggtttgacattgccgcttgtcgtccgtcttgaaggcacaaacgtggatctagggaagaaaatccttagtgaatcaggattaaacattacatctgcggaatcaatggctgacggcgcgcagaaaatcgtatccttagtttaagaaagaatgaaaggcaggggaccaaataatgagtgttttcattaataaagatacaagagttattgtgcaagggattacaggttctaccgctttatttcatacgaagcagatgcttgaatacggcacaaatatcgttggcggtgtaacacctggaaaaggcggaacagaagcggaaggtgttcctgtatttaatacagtggctgaagcagttcaaacaaccggcgctaacgcgtctgttatatatgtgcccgcaccgtttgcagctgatgcgattatggaagcggtagatgcggagcttgatctcgtgatttgtatcacagaacatatcccggttttggatatggtgaaggtcaaacgcttcatggaaggcaagaaaacgagactgatagggccgaactgtcctggtgtcattacgcctgaagaatgtaaaatcggcattatgcccggatacatccataaaaagggtcatgtaggcgttgtatcacgttcaggaacattaacatacgaagcggtgcaccagctctcagaagcgggtgtagggcaatctacagctgtgggaatcggcggcgaccctgtaaatggaacaaactttattgacgttttaaaagcgtttaacgaagatcctgacactcacgcagtcatcatgattggcgaaatcggcggtactgccgaagaggaagcggcagagtgggtaaaagccaacatgacaaaaccggtagtcggttttatcggcggtaaaacagcacctcctgggaagcgcatggggcatgcaggcgccattatttccggcggaaaagggacagctgatgaaaaaatcaaaacccttaatgcatgcggaatcgaagttgcagagacaccttctgtcatgggtgaaaccttaatcaaggtgctgaaagagaagaacttgttcgaaacttgcaaaacgcattaataaaaaagggacagccgtcaaggctgttcctgctttttctaacaaaaggaggtcaatctattggatcaggccgctgcctgcctaacgatttgcagaatcaatcaattattatccccatcccttctattaaaatggtggaaagccgatccgtctatgtcgctgacatcacccgtgttacaaacggttactcgtgatcaaataaaagcagctgcattaaaaaacgaaatagaacaattttatccaaagctcccgcgtgtacttgctgcttatcgtgagcaaggcattaacaccatccctatttcttcaaagcaatatcctttctggcttaaaagcatttatgatccccctgccgtactgtttgcaaaaggtgatatgactcttctttcgaaagggagaaaaattggaattgtagggacaagaaatccaacagcttatgggaaacaagttgtcaatcatcttacaaaagagatctgtcgtaaaggttgggtgattgtcagcggactggcgtctgggatagacggaatgtcccatgctgcaagtattaaggcgaaggggcggacaattggcgtcattgcaggcggatttcaacacatttatccccgagaaaaccttcagttagcagatcacatggctaaacaccatatcctgctgtcagagcacccacctgaaactaaaccccaaaaatggcatttccctatgagaaaccgtattatcagcggactaagtgaaggcgttattgtcgttcagggcaaagaaaaaagcggttcgctgattactgcctatcaagcattggaacaagggagagaggtatttgccgtacccggttcattgtttgacccttacgccggaggtcctataaaactgatccagcagggggctaaagccatatggtcagcagaggatattttcgaggaacttcctgagagaaacgttcaatatacggaacccttttgaattatcgtttgacaaacggtattgtaatatttaataatagtgaggatttaaagttgcatattgttttctatttaattaatgacgttcatgataaagaatgaaatgttgaaagccaaataaagacagctgcaaaaataaaattgaaatatcttgaaaagagagagaacacctcttgagggggatgaaaatgtctgattatctagtcatcgtggaatcgcccgctaaggcgaaaacgattgaacgttacttaggtaaaaaatataaagtaaaagcatcaatgggacatgtccgggatcttccaaaaagtcaaatgggagttgacatagaacagaattttgaaccgaaatatattaccattcgaggtaaaggcccggtattaaaagagctgaaaacggctgcgaaaaaagccaaaaaagtgtatctcgcagccgaccccgacagagaaggggaagcgattgcatggcatttggcacacagtcttgatttagatctcaactcagactgccgtgtggtgtttaacgaaattacaaaagacgctattaaggaatcgtttaagcatccccgcatgatcaatatggatttagtggatgcacagcaagcgagacgtattttagacaggcttgtcggatataaaatcagtccaatcttatggaaaaaagtcaaaaaagggcttagcgcaggacgcgtgcaatccgttgccctccgtttgattattgaccgtgaaaaagagattaacgactttaagcctgaggaatattggacaattgacggtacgttcttaaaaggtcaagaaacctttgaagcgagctttttcgggaaaaacggcaaaaaacttcctttaaatagtgaagctgatgtaaaagagattctttctcagctcaaagggaatcaatatacagttgaaaaagtaaccaaaaaggaacgcaaacgtaatcctgctttgccttttaccacttctaccctgcagcaggaagcggctcgcaagctcaatttcagagcgaagaaaacgatgatgattgcacagcaattatatgaaggaattgatttaggaagagaaggaacggttggtctgatcacgtatatgagaacggattcaacccgtatttcaaatacggctgttgatgaagcagctgcatttattgatcagacatatggaaaagagttcctaggcggaaaacggaagcctgcgaaaaagaatgaaaatgcccaggatgcccacgaagcaattcggccgacatcagttcttagaaaaccaagtgaattaaaagcagtcctcggcagagaccaaatgagactgtataaattaatttgggagcgttttgttgccagccaaatggcaccggctgttctcgatacaatgagtgtcgacctgacaaacaacggtttgacatttcgtgcaaatggaagtaaagtcaagttttccgggtttatgaaggtgtatgttgaaggaaaagacgatcaaatggaagaaaaagaccggatgctgcctgacttacaagaaggcgacacggtattatcaaaagatatagaacctgagcagcattttacccagccgcctccgcgatatactgaggcccggcttgttaaaacccttgaagaacgcggtatcggccgtccatccacatatgctccgacacttgatactattcagcggcgcggctacgtggcattggataataaacgtttcgttccgactgaattaggtcagatcgttcttgacttgatcatggagtttttccctgagatcattaacgttgagtttacagctaaaatggagagagatcttgatcatgttgaagaaggaaataccgaatgggtcaagattatcgataatttctacaccgattttgaaaaacgcgtcaaaaaagccgaatcggaaatgaaggaagttgagattgaaccagagtatgctggagaggattgtgaattgtgcagttctccaatggtatataaaatgggacggtacggtaaattcttagcttgctccaacttccctgactgccggaacacgaaaccgattgtgaaacaaatcggtgtgaagtgcccgagctgcggagaaggaaacattgttgagcgaaaatcgaaaaagaaacgggtgttttacggctgtgaccgttatccggactgtgaattcgtatcatgggacaaaccaattgaacgaaaatgcccgaaatgcggaaaaatgctcgtcgagaaaaaactcaaaaaaggtatacaagtccaatgcgtggaatgcgattataaggaagaaccacagaagtagcggtgagcagggtcttgctcaccttctttgtgtgttaaaagaaggccttgaataataaaataggagatgtgaaagatgaaccaacaaacagtgaatgtaatcggagccggactcgcaggaagtgaagcagcatggcagcttgccaaacgtgggattcaagtcaaattgtatgaaatgcggccagttaaacaaacgcctgcgcaccatacagataaatttgctgagcttgtctgcagcaactctcttcgctctaatacacttgctaacgctgtcggtgtattaaaggaagaaatgcgtgcgcttgattcagccattatcgctgcggctgacgaatgttcggtgcctgccgggggcgctcttgcagtagaccgtcatgaatttgccgcaagtgtgacaaatcgggtgaaaaatcatccaaacgtaaccgttattaatgaagaagtgactgaaattcctgaaggccctactatcatcgcaacgggtccgttaacatctgaatcgctgtctgcccagctgaaggagctgactggagaggactatttatatttttatgacgcagcggcgccaattgtagaaaaagacagccttgatatggataaagtgtacctaaaatcccgttatgataaaggtgaagcagcatatttgaactgcccgatgacagaagaagagtttgaccgttttcatgaagcattaacatcagcagaaacagtgccgttaaaagaatttgaaaaagagattttctttgaaggctgcatgccgattgaagttatggcaaaacggggtaagaaaacaatgcttttcggtccgatgaaaccggttggtctagagcatcctgttacaggaaaacgcccttatgccgtcgttcagctcagacaggatgatgctgcgggaacactttataatattgtaggattccagactcatttaaaatggggagaccaaaaggaagttctcaagttgattccaggacttgaaaatgtagaaatcgtcagatatggcgtgatgcacagaaacacatttattaactctccaagcctgttaaagccgacttatcaatttaaaaaccgcagtgatctgttctttgcaggccaaatgacgggagtagaaggatatgtggaatcagctgcctcaggacttgtagcaggcattaatgcggcgaagcttgtattgggagaagagcttgtgatcttccctcaggaaacagcaattggcagtatggcacattatattacaacaacaaaccagaagaacttccagccgatgaatgcaaactttgggcttttgaaagaattgccagttaaaattaaaaataaaaaagaacgaaatgaacaatacgcgaaccgtgcgattgaaacaattcaaacaatttcgaaaacaatataggtattgattgcaacctgagcgcgatttgtgataccatttaaaagcccttcctggggaggtattaggcatggagaatgttaagaatttcgtaaagttattcgttgaatatttacaaattgaaaaaaattattcacaatatactattgtgaattatgtggattcaattgaagaattcgagactttcctgcgcgttcaaggtataaatggatttgaagaagctgcatatcaagatactaggatttttttgacagaagcctatgaaaaaggtttatcgagaagaacaataagcaaaaagatatctgcattaagaagcttttataagtttctgatgcgggaaaagcttattgaagaaaatccgtttcagcttgttcatctgccaaaacaggagaaacggataccgaagtttctatatcaaaaagagcttgaggagctgtttgaagtttcagatataagccagccggccggaatgagggatcaagcgctgttagagctgctctatgccaccggaatgagggtcagtgaatgctgttccataactattaacgacgttgatttatttatggacactgtgcttgttcacggtaaaggcaagaagcagcgctatatcccctttgggtcttatgcccgcgaagcgttgaaggtatacatgaatagcggaagacagtgcttgctgatgaaggcaaaagaacctcatgatctattattcgtaaatcaaagaggcggaccgcttacagcccgtggcatcagacatattttaagcgggcttgttcaaaaagcgtcaagcactttacatatccatccgcatatgcttcgacatacgttcgccacgcatctgttaaatgaaggagcggatttgagaagcgttcaagaactgctcgggcattccaatctgtcttctacacagatatacacgcacgtttcgaaggaaatgttgagaaacacatatatgtctcaccatccaagagcatttaagaaaaattaaaggaggccctttatgtcatcttttcatgcgaccacaatatttgccgtacagcataaaggacgaagcgctatgtccggagacggccaagtaacatttggtcaggctgttgtcatgaaacacacggcacggaaagtgagaaaactgtttaacggcaaagttcttgctggctttgcgggatctgttgcagacgctttcactttattcgaaaagtttgaagctaagcttgaagaatataacggcaacttaaaacgggcggctgttgagcttgcgaaggaatggcgcagtgataaagtgctaagaaagctcgaagccatgctgattgttatgaatcaggatactttgcttctcatatcgggaacaggcgaggtgatcgaaccagatgacggcattctcgcgattggatcaggaggcaattacgctttggcagcgggaagagcactgaaaaagcatgccggtgaaagcatgtctgcaagtgagattgccagagccgcgttagaaacagcaggcgaaatttgtgtttacacgaacgatcaaatcatactggaagagcttgaatagaaaggacttgaggcgcatggaaaaaaaaccgttaactcctagacagattgtagatcggttagaccaatatattgtcggtcagcaaaatgcgaaaaaagctgtcgccgtggcattaagaaaccgctatagaagaagtcttctggatgaaaagctgaaggacgaggtcgttccgaaaaacattttaatgatgggtcctaccggcgtcgggaaaactgaaattgccagacgaatcgctaagctttcaggtgcgccatttatcaaaattgaagcgactaaatttaccgaagtcggctatgtaggcagagatgttgaatcaatggtcagagatcttgtggagacttctgttcggcttataaaagaagagaaaatgaatgaagtaaaggaacaggcagaagaaaatgcaaacaaacgcattgttcgtctgttagttcctgggaagaaaaaacaatctggcgttaaaaatccgtttgaaatgttttttggaggcagccagccgaatggtgaagatgaggcggagagccaggaagaagcaaacatcgaagaaaaaagaaaacgaatggcacatcagctggctttaggagagctcgaagactactatgtaacagtagaagtcgaagagcagcagccttctatgtttgacatgctgcagggctcgggtatggagcagatgggtatgaacatgcaggatgcgctgagcggattaatgccaaagaaaaagaaacggcgcaaaatgacagtcagagaagccagaaaagttctgacgaatgaagaagcaagcaaactcatcgatatggatgaagtcggccaggaagcagttcagagagcagaagagagcgggattatctttatcgatgagattgataaaatcgcaaagaacggcggtgcatcttcttctgccgatgtttcaagagaaggcgttcagcgggatatccttccgattgttgaaggttctaccgttgtcacaaaatatggttctgtaaaaacagaccatgtattatttattgcagcaggagcgtttcatatggccaaaccgtctgatttgattcctgagctgcaggggcgtttcccaattcgtgtagaactgaacaaactcacggtagacgacttcgtgagaattttggttgagccggataatgcgctgctgaaacaatatcaggcattattgcagacagaaggtatatctcttgaattttctgacgaagctattcataagattgctgaagttgcttatcatgtgaaccaggacacagataatatcggtgcgagacgccttcatacaatacttgaacgcctattagaagatttgtcgtttgaagctccagatgtaacgatggagaaaataacgattacaccacagtatgtcgaagaaaagctcggaacgatagccaaaaacaaagatttaagtcaatttatattgtgaaaaatttaatatgaggaatgtttaggaggattatttatcatggctttattacaaaaaacaagaattattaactccatgctgcaagctgcggcagggaaaccggtaaacttcaaggaaatggcggagacgctgcgggatgtaattgattccaatattttcgttgtaagccgcagagggaaactccttgggtattctattaaccagcaaattgaaaatgatcgtatgaaaaaaatgcttgaggatcgtcaattccctgaagagtatacgaaaaatctgtttaatgtccctgaaacatcttctaacttggatattaatagtgaatatactgctttccctgttgagaacagagacctgttccaagctggtttaacaacaattgtgccgatcatcggaggcggggaaagattaggaacacttattctttcacgtttacaagatcaattcaatgacgatgacttaattctagcagaatacggcgcaacagttgtcggaatggaaatcctaagagaaaaagcagaagaaattgaagaggaagcaagaagcaaagctgtcgtacaaatggctatcagctcgctttcttacagtgagcttgaagcaattgagcacatttttgaggagcttgacggaaacgaaggtcttcttgttgcaagtaaaattgctgaccgtgtcggcattacccgttctgttattgtgaacgcactcagaaagctggagagcgccggtgttatcgagtctagatcattaggaatgaaaggtacttatatcaaggtactaaacaacaaattcctaattgaattagaaaatctaaaatctcattaatcacaaaaagaaccctttttgagggttctttttttatttcaaataaaggaaatcaataagctttatttcctgggttgaaagtctttctatgtaataattttaataaattttgcatttttcttcaaaaagtttcaaaaatgccgaaaagaaaggagaaaaaacagaaattctgctattttcaggcttatatcaaggcgagaaatgtagttctaacaatctaggactttatacctagttgcaaaatagataattgtgaggacatttttttacacgaacttcatagactttatgcctgttatttcttacaataagcatatagttttacaattctcgacaaggatattgagggtgaaaaaaactgaaatggaggtaagtggatttgagcttattttctggaacgatacaaaatcttgaaaatgccttgagtagagcggatattaagcaaaaagtcataactaataatatcgccaatatagatacaccgaactataaggcaaaaaaagtctctttccaaaatttattagatcaagaatcctcgcgtcttgaagcgataaaaacagactatcgtcatgttgatttttctgatactgattcgaattattcaattgttgcgagcggagatacatcgtatcagcaaaacggaaacaatgttgatgttgacaaagagatgacagaattggcgcaaaatcaaatcaactatcaagctttggttgaaagaatgaacggtaaatttaattcgctgaagaccgtattaacaggaggaaaatgatgacagcttttcatagcttaaatgtttcagcatcggctttaacagctcagcgagtcagaatggacgttgtatcatctaacttagcaaatatggatacgacaagagctaagcaggtgaatggagagtgggtgccttacagaagaaaaatggtttcccttcagtcaaaaggtgaatcgttctcttctattctcaattctcaaatgagcggaagcgggaatgctggaaacggtgtgaaggtttcaaaaattacggaggatgattcagattttaatcttgtctatgatccgacagaccctgatgcaaacgctgaaggatatgtacaaaagcctaatgttgatccattaaaggaaatggttgatcttgtcagcagcaccagatcatacgaggcgaatgtcacggcgatgaatgccacaaagggaatgctgatgaaggcgttagaaatcggaaagtaggtgaatgaatgtgattaatgcaatttctccttttcaggttcaaaatactcaaaacactcaaaatgcaacaaatcaagtaaacaatagccaaaaaacagattcttcaaatcaaacaagcttttcggagcttttaaaaaactctattagttcgttaaatgagtcccaagtagcttctgacaacatgactaatgccttggctgcaggaaaagatgtaaatcttgatgaggtcatgatcgctgctcaaaaagccagcatctctctaactgcagcaacagagttccgcaataaagctgtggaagcttatcaggagattatgagaatgcaaatgtagggggtctgacgatttagagaaagagtggaatgaccgggggttaacatgaatcgtactctaatgcaaatgaaaaacaaaacgagtgagttttggaaaaatagatctaaattacaaaagattttaatggttagtgctttagcggcaattattattattggaattattattagtgtttttgcttcgaattctaaaatggcgccgctgtacaaagatttgtctgccgaagaagcaggacaaatcaaagaagaattggatgcaaaaaaagtgccaaacgaactttcgaatggcggtacagtgattagtgttccggaggatcaggttgattctttgaaagtgcagatggctgcagaaggacttcctaaaacgggatcaattgattattcgttttttggacagaatgccggctttggtttgacagacaatgagtttgatatggtgaaagtgaaagctacacagacagaactgtcaaacttgatcaatgaaatggacggtattaaaaattcaaaagtaatgattaatctcccgaaagacgctgtgtttgtcggtgaggagcaatctgcagcatctgcatcaatcgttttgcagattcaaccgggttatacacttgatcaaagccaaatcaacggattatatcatctggtatctaaaagcgtgccaaacctaaaagaagataacatcgtcatcatggaccaaaattctacatactacgacaaatcagacagcgatgcagggtcctacgcggatagttattcttctcagcaaggaattaagtctcaagttgaaaaagacattcaaaaacatgtacagtcattgctgggtacgatgatgggccaagataaagtcgttgtctccgttacagcagacattgatttcacaaaagaaaatcggacagaagacattgtcgaacctgtggataaagaaaacatggaaggcattgcagtcagcgctgaaaaggtatctgaaacatatcagggcgacggtgcagccaacggcggaactgccggaaccggcgaggaagatgtaccaaattataaggctgacggtgaaaataccgaaagcgggaactatgaaaaaaacagcaacaaaatcaattacgaggttaaccgaattcataaagaaatcgctgaaagtccttataaggtcagagatttagggattcaagtaatggtagagccgcctgatgccaaaaacacagcgtcgctatcaactgaaagacaggatgatatacaaaaaatcctttcaactgtagtcagaacatctttggataaagatgaaacgcaaaatcagaatttatctgatgctgatatcaataataagattgttgtttccgttcagccattcgacggaaaagtcaatttggatacaaatacggaaaaatcctctggtatcccgctgtgggcatatattgtaggcggtgttttaatcgcagcgattattgttctgatcattatgcttatcagaaagaaacgggcgcaagaggatgaatttgaggaatatgagtatgaggttcctcaagaacctatcaatttgcctgatatcaacgaagaggaaaatgaaacagcggaatcagtcagacgaaaacagcttgaaaagatggcgaaagacaagccggaagattttgcaaaactgctgagaagctggctggccgaggattaggaggaattagaaatggcgagacgtgatcaagataagcttacaggaaaacaaaaagcagccattctcatgatttccttggggttagatgtgtcagcttctgtctataagcacttaaccgatgaagaaattgaaaggcttactctggaaatatcaggtgttcgaagcgtcgatcatcaaaaaaaggatgaaatcatagaagaatttcataatatagccattgcacaagattatatttctcaaggcggtttaagctatgcaagacaagttctggaaaaggcgcttggagaggataaggcagagaacattctaaacaggctgacttcttctttgcaggttaaaccatttgattttgccagaaaagcggagcctgaacaaattttgaattttatccagcaagagcatccgcagacgatggcgttaatcttgtcttatttagatccagtgcaggccgggcagattttatccgagctgaatccggaagtacaggctgaggttgcgagaagaatcgcggttatggatagaacatctccagaaataattaatgaggtagaacggattctggaacaaaaattatcttctgcatttactcaggattatacacaaacaggcggaattgaagctgttgtggaagtgttaaacggggtagacagagggacagagaagacgatcttggattcattggaaattcaggatcccgatcttgctgaagaaattaaaaagcggatgtttgtcttcgaagatattgtcacacttgataaccgtgccattcagagagtcattcgcgatgttgagaacgacgatttgctcctttcattaaaggttgcaagcgaggaagtcaaagaaattgtattcaacaatatgtcacagcgtatggttgaaaccttcaaagaagaaatggaatttatgggccctgtacgcttgaaagatgtagaagaagctcaatcgagaattgtaagtatcgtcagaaagcttgaagaagccggtgaaattgtaatagcaagaggcggaggggatgatattattgtctaatatcattaaacaagaatcatctatttctccacaaaaggaaaaaagaaaactttctatacaagaggtgcgtattgatcattctcaccttttgcaggctgaagagaacccggaggcgcttatggcccgagtgaaagaggaagctgatcggatttctgagcaggcaaacagtcatatagaaaatattcgccgtcaaattgaacaggagaaaaacgattgggcggctgaaaaacagaagcttattgaagaagcaaaagccgagggctttgaacaaggagtagcgctgggcaaagctgaggcaatgaaacagtatgcagaactgatcggccaagcaaacagtataactgaaatgtccagaaaagctgttgaggacaagcttgaagacgctaatgaagaaatcgttgagcttgccgttgccctagcaaaaaaagtttggcagcaaaagtctgatgataaagaggctttcctcctgcttgtacaacaggttataaacgaagtgaaggaatatgacgatatatcaatttatgttgatccatattactatgagacaatctttcagcaaaaagatgaaatccagcagcttctttataaagaatgtcggcttggcatatatgctgatgaaaaagctcaaaaaggaacctgttatattgaaactccttttggcagggtagatgcgagtgttgacacacaattgatgcaattgaaagataaacttctgacagcgctggaagcaggtgcagctgaatgaagacacagagtctgatagattgtatagaaatgacagactcgtataaacggtacggaaaagtcaagcgggtcatcggcctgatgattgaatcaaaagggccagcaagctcaattggcgacgtgtgcctgatttatgcaaaaggacaatctgggaaagtcattaaagctgaggtagtcggcttccaggaagaaaatattttgcttatgccttatttagaggctgcgagcattgcacctggcagcattgtagaagctactggggaatcacttcgggttaaagttggaaccggactgattggacaagtcatcgatgcttttggagaaccgcttgacggaaaacttctgcctaaagggctttcgcctgtatcaacggagcaatcaccgcccaacccgatgaaacggccgcctatccgtgaaaagatgggtgttggagtcagatcaattgacagcttgctgacagtcggtaaaggccagcggattggaatttttgcaggaagcggtgtcggaaaaagcaccttaatggggatgatcgccaagcagacagaggctgacttaaacgtcattgcacttgtcggagaacgcggacgagaggttcgggagtttattgaaaaagatctggggaaagaggggctgaaacgatcgattgtagtcgttgccacctcagaccagccagcattaatgagattgaaagcggcatatacagcgactgcaattgccgagtatttccgagataaaggccaaaatgtcatgtttatgatggattctgttacaagggtggcaatggcgcagcgagagattggactggctgcaggagagcctccgacgacaaaaggttatacaccttcagtgttcgctattttacctcgtttactagaacgaacaggtgcaaacgagcatggaaccattacggcattttatacagtgttggtagacggggatgacatgaatgagccgattgccgatactgtacgcggaattttagacggacatattgtgttggacagggcgcttgccaataaaggccagtttcctgcagttaacgtactaaaaagcatcagcagggtgatgtcaaacatttcaacaaaacagcatctggatgcggcaaataaattccgtgaacttttatcgacatatcaaaattcggaagatctcattaatatcggagcttacaaaagaggatcatccagagaaattgatgaagcgatacaattttatccgcagcttattcaatttttaaagcagggaacagacgaaccggctttattggaagaaagcattgctgcattaactagtttgacaggaaatgaggaataaacgtggcttatcaatttagattccaaaagctgctggaactaaaagaaaatgaaaaagaccaatccttatccgagtatcagcaatcagtttctgaatttgaaaacgttgctgaaaaattatatgagaatatgagcaaaaaggaattgctggaacaaaataaggaaaagaaattaaaaagcggcatgagtgtacaagaaatgaggcactaccaacaatttgtctcaaatcttgataatacgatctatcactatcaaaagcttgtcattataaaaagaaatcaaatgaatcaaaaacaagaaattttgacagagaaaaacattgaagtgaaaaagtttgaaaaaatgcgtgaaaaacagtttaaaatgtttgctcttgaagataaagctgcagaaatgaaagaaatggacgatatttcgattaagcagtttatgattcaaggccattaggagcgaatgtaatgtccggcaaaaagaaagaatcaggtaagttccgttcggttttgcttatcattatcctcccgctgatgtttctattaatcgcaggggggattgttctttgggctgctggtatcaatgtcataaagccgatacaggatgctgcggcaaaaacgccggttcttaaagaattggtccctgaaaccgaaaataaaaaaggcgcagcatcaagtaaggatagcagtaatacggcagctctggaaaagaccattaaggatcaaaaaagtgaaatcagtatattgaataaagatttagaaacaagtaaatcagaaatcgataggctcaatcaaaagatccgttcacttgaaaagacggctgaggatcaaaaaaagtcatcagaagatcatactgaaggatcagcagactcgaaagcttcttctgaaaatgacaaagtgatcagtgtgtacaaaagcatggacagcggaaaggctgctaaaattattgcccaattaaaggagcaagaagcactgaaaatattgaatggcctaagcaaaaagcagcttgctgacatattggcgaaaatgactcctgagcaagcagcaacctatacagaaaaaattgctgccagccaagaatagggggaatgaaaggtgaagctgcttgaattagccggacctttgctgcaaaccacaacgggttctgccgctaaaaacatgaaaagtagccaaggagtttttcaaaactggcttatgtctgaggctggattgaaggaactttcagaacaaggaaagggtactcctaattccgaagatcagcttttagcagatgcgcttaaaaagatcggtgactggctaaatgcaagtcctgaagatcaagacaaacaaaatgcggatcttttgcaaacattaagcaaactgacagggaagcaattggatgcgaatgctctgcaaatgttgcaaaatcttttgcaagcagttgaatcaaaaatgtcaggcgggacggatcaattgctcacagaaacggagaaaatcttttcagaagctaaaacggctctgagtgccaatgattctgcttctgacattaatggagcactgaagtctgatacagagcaatcaaatcaggaaaatgaagtatccgagcctgctaaagagcttatctatatccagatgttcattagccagctcgtagaagggaataagctgactgatcgcgggaatggcaatgaagctcatgccatttaccaaaatggagatcaattcctttctgcattagaaaagaagggtgtatctcaacaactaattcaggatcttaaacagcaaatattcactaaagctgagtcaagttcaaaactttactcgatgacagcgtcagagctgaaaagttttcaaagcttaatggatcaaatgtctatgcttcctcaaaaagggaccaaagaatggagtttagctgaaagccagctgaaagccttcttgttatcgaaatcatccgaatcatcacaagactttgggaagcgtgttctcacaccgctctcgcagagttcatccagcaaaaatgcatcggatgtttctggaagtattcagcctgtagatagtaaatcaggactccaaatgctgttttcggggtatcggggcataggaggagttcaaacacttgatctgcagcagatgtcatctgatataccaaatgccgaaacaaaaacggtggctgatcaagtgattaatgcgtggaagcagatgaaatatacgcctttcggcagatcgacgggaagtttcactattcggctgaaccctgaacatttaggatttgtcacaatcaagctgacaaatgaaaatggaatgtttcagagtaaaatcatagcatctagccaatcagcaaaagaattgcttgaacagcatcttcctcagctgaagcaatcattgccgaatatggccgtccaaattgaccgttttactcttccggtccaaagcggggatcagccgatatacggccagcttgctgatgaacagaaacagcagcaagaggggcagagacagcaaagacagaaaaagcaatcaaatgattttggcgatctgctcgatgaagtgtcgatggttgaaatggaggaagaagaatgacttctataagttcagaatataaactgcctgaaaaaacgaacactgtgtcgacgaacaacagcagcttggggaaagacgagtttttaaaaatattaatgactcaagttcaaaaccaagatccgcttaacccgattgacgataaagaatttatcagccagatggcgactttttcaagcttggagcaaatgatgaatctgaatacgacaatgactcaattcgttgaaaaccaagatccgtttacaacgtatgttgattggatgggaaaagaagtatcttggactgatggtaaaagtgcaacagataaaacaggcacaataagctctgttaaacattttaaaggaaattattatctcgttcttgatgatgggaccgagatcagtcctgcgaatgtcatgtctgtgggacaatcatctaaataaaaacatctgggggaatatattatgttacgttcactttattctggaatcagcggtatgaagaactttcaaacaaagcttgacgtaatcggtaacaacattgccaacgtaaatacagtaggattcaaaaagagccgtgtgacctttaaagatatggtaagccaaaccattgccggcggttctgctgctggtgcaacaatcggcggaacaaactctaagcaaatcggtttaggttcatcatctggcacaattgatacaattcattcaacaagcgcgacacaaagcacaggaagaacacttgatttagcaattgacggcgacggttacttccgaattgatacaggtgacgggacagcttatacaagagcagggaacttctatttagataatactggaacactggttacaggtgatggctaccatgtactaaatatgaatggcggaacaattaaaattcctactgatgctcaaagctttagcattggttctgatggaaaggtgtcaattgttgatgctgaggggaaaacacaagacgggggacaaatcgggattgttacttttgccaacagtgacggcttagataaaatcgggagcaacctataccgtgaatctttaaactctggaacggccagtgcagcgaaccagcctggtgacggcggaactggtgctcttaaatcaggatttctcgaaatgtctaacgtcgatttaactgacgaatttactgaaatgatcgtagcccagcgcggattccaatcaaactcaaaaattattacaacatctgatgaaatccttcaagaactggttaaccttaaacgttaaggagggaggggaggcgagtaatcgcttctccgctgttttatgattaaagtaacccgtttgaacgggcagccctttacactgaatgcgctatttattgaacagattgaatgttttccggatactacaattactctgtcaaatggtaagaagtttgtagtaaaagaagatgaagaagctgttctggaaaagatcgcagctttctaccgaaaaatacaaatatttgcaatggatcaaggaatagaggaaccggaatgaagaaaaagttaatgatcatattactaattattcttatcgtaattggtgctctcggggcggcggcttattttgttttaggcggaaagtccgaaaaaagtgaagcgaaaaaaagtattgatgaaatcgttgcgtcttctgttgatgtagaagagatcacaacaaatttaaagtctgataacattatccgtcttgctattaaacttgaaactgattctgataaatcaaaagaagaacttgagaaacgtgatttccaagtgaaagacgctgttatatcactgctggctgatacgaatgctgatcagattgagggagacaagggaaaagaaacctttaagaaggaactaaaagataaaataaatagctacctccaagaaggaaaagtagaaaaagtgtatattacctcctttaatctgcaataaagcataatttgacagaatacggaggtgaggaaaatgtcaggagaagttctctcccaaaatgaaatagatgcactgctctctgcaatatcaactggtgaaatggacgctgaagagctgaaaaaagaagaaaaagagaagaaagtcaaggtttatgatttcaaacgtgcgctgcggttttctaaggatcagatccgcagtttaacgagaattcatgacaattttgcaagacttcttaccactcatttttctgctcagctcagaacctatattcacatatctgtcagttctgttgatcaggttccgtatgaggaatttatcagatcgattccaaacatgacgattctgaatctatttgatgttcatccgatggaaggaagaattatgatggaggtcaaccccacgatagcttatacgatgatggatcgagtcatgggcgggattggaatcagtcataacaaggttgacagtttgacagaaattgaaacaaaaatcatttctaatttatttgaaaatgcactgggtaattataaagaagcttggcagtcaattgctgatattgaaccggaaatgactgagtttgaagtgaatccgcaatttgttcagatggtatctcctaatgaaacagtcgtggtgatctcgctcaatactcaaattggtgaaatcagcggtgtcattaatctctgtatcccgcatattgtactcgagccgctcataccgaagctttcagtccactattggatgcaatcagaccgaaatgagccaaagcctgaggaaacaaagtcgcttgaaaaacgtatcatgacagcacaaatacctgtcgtggccgagctcggcacatctgaactgacgatagaagagtttttaagtttagaagtcggagactgcataactttggacaaatcagtcacggatcctcttactgtattggtcggagataagccgaaatttttaggacaagccggccgggtgaatcgaaaacaggcagtgcaaattttagatcacgacataagaggtgaacaagatggagaataatagattatctcaagatgagattgacgcgcttcttaacggtactggcagcacgcttgatgagccagagattccggaagtagatgacttatcggaaatggagcgtgatgcgatcggtgaaatcggtaatatttcattcggcagttctgcgacagcactgtcaacgcttttaaatcaaaaggtcgatattacgactccaagcgtaacggtcattccaagaagtaaaatcagcgatgcgtttcctgaaccgtatgtagcgattgaagtgaattatacggagggcttcagcggaagcaacctgttagtcgtggaacaaagtgacgcggcgatcattgcggacttaatgatcgggggagacggaaaaggtgcggacccttcactgggtgaaatccatttaagtgcggttcaagaagcaatgaaccaaatgatgggatcggctgccacatcaatgtctactgtattcagtaaaaaaattgatatttcacctcctcgggttgaattgctggatgttactgaagaaaagggtacagaccgtattcctgatgatgaaatgctggtgaaagtttctttcaacttaaaggtgggagaattaatagactccagcattatgcaactttacccattgacatttgcgaaagatttaatttcaagccttatgaactcagaaagtgcagaggaagaagaaacggtgcagcctgaagttacatacgaacagccgaaagagcctgtgacgccagagccgcgtattgaaccgaagcaacagcagcagccgccaaaaaggcagggaacagcaaaaaaagcagcgccagttcaggtttcaccggtggaattttccgcgtttgatccaaacgaagctgtacaagcccctattcataatctggatatgcttttggatatcccgctttcgattactgttgagcttggcagaacgaagagaagcgtaaaagagattttagagctttctgccggaagtattatcgagcttgataaattagccggtgagcctgtagatattttagttaatcagcgtatcgttgccaaaggcgaggtcgttgtcattgaagaaaacttcggagtaagagtcactgacattttaagccaggcagagcgcattaataatttaaaataacgaaacacaaggagagagatagattatggcacatagaattttaattgtagatgacgcagcatttatgcgaatgatgattaaagatattttagttaaaaatggttttgaagttgtggcggaagctgaaaatggagcacaagcggtagagaaatataaagagcattcacctgaccttgttactatggatatcacgatgccagaaatggatggtattacagcattaaaagaaattaaacaaattgatgcgcaggcaagaatcatcatgtgttctgctatgggacagcaatcaatggttattgatgccattcaggccggcgctaaggatttcattgtgaaacctttccaggctgaccgtgtgcttgaagcaatcaacaaaacattaagttaaagggtgtacgactgttgaaaaagagtcaatattttattgtttttatttgttttttcgttttattcagtgtacatccgattgctgctgccgcggcagactctgataattcaactgtaaacgaatggtttcaaaagaaagatgaaaaaactgcagatcaatcagagcaaaagaaagaaaaaacaacaaaaactgctgatgagacggagggagcggctgctccttctgtctcagcttttgattttgtaaagatgattttcgctttattgtttgttatcgcgctgatttacgggctggttaagctcatgaacaaaagaaatcggctcctaaagccttttcaatatgttgaaaatattggcggcacatcggtcggccagaacagatccatacaattgatcaaggtcggaaaaagtgtgctcatcgtcggtgtaggagagacgatccagctgctgaaagaaattgaggatgaaaaagagattgaagtcattctcagtcagcatgaagaggcaatgtcaagcaaaatagagtggcaaaagtttgtgaagccgcttaagagttctgaacatcagccgcagcaaaaactgccttcattttcaaaagcattaaaagagcaacttgaagagttaaaacaaaaccgttctgaaggaaagaagaaaggcccacgtcatcatgaatgagtttataaatattttcagttcaagcgatccggaaaacgtaagttcgactgttaaattactattattgttaactgtattttcagtggcgcctggaatattgattcttatgacttgttttactcgcatcgtcattgttctgtcatttgtcagaacttcacttgcgacgcaatctatgcccccaaaccaggttctaatcgggcttgcgctgtttttaacattttttattatggctcctactttttcagaaattaataaagaagcgctgaccccattaatggacaacaaaatcagcttggatgaagcgtatacgaaagctgaggaaccgattaaagaatttatgagtaaacacacaaggcagaaggatctggcgctgtttatgaattacgcgaaaatggataaacctgaatcattaaaggatattccgttaacaacaatggttccggcttttgccatatcggagcttaaaacagcatttcaaataggttttatgatttttatcccttttttaattatagatatggtagtggcgagcgtcttgatgtcaatgggaatgatgatgctgcctccagttatgatttctctgccctttaaaatattactttttgttttggtagacggctggtatttaattgtgaaatctttgcttcagagcttttagggtaggtgctaaacgtgagttcagaatttgtaatttctatggcggaaaaagccgtatacgtaacgctgatgatcagcgggccattattggctattgctttactggtcggtttaattgtcagcatatttcaggcgacaactcaaatccaggaacagactttggcgtttattccgaaaatcgtggcggttctcctggctctcattttttttggtccgtggatgctgtcgacgattctttcatttacaacagagctgttttctaatttaaatcgttttgcagggtaatgtagagatgaattcaattattgacttatttcctgcttttttattggtttttattagaatctctgctttttttgtaacgattccgctatttggacatcgaaatgtgccagctgttcatcgcataggttttgctttttttcttgcggtcatttgtttcagcaccattgataaaccgccctctttggagatagatgagcactatatgcttttggcgtttaaagaagctttggtcggcctatgtctgggtttaattgcttatatgatgattgccgcagtgcagattgccggctcgtttattgattttcaaatgggattttcaatagcaaacgttattgatccgcaaaccggtgcacaaagtccgttgattggccagtttatctatacgatggcacttttgtttatgctaagtgtcaatgcccaccatttgttgctggatggtatttactacagctttcagtatatttcagttgatcaggcatttccgaatttcggcgatgaaaagtttgcctattttattgcgaaaagctttaatgcaatgtttattatcgcttttcaaatgtcagcgccggttgtggccagtttgtttctagttgatttagcattaggtatcgtggctcgaactgttccgcagttaaatgtatttgtggtcggtctgcctttaaagatcgctgtcagtttcattatgctcattgtatgtatgtccgttatcttcgtcgttgtccggaatgttttcagtttaacgattgaaacgatgcggaatcttttagcattggtcggtgtttcttaatgaagcttagagttgacctgcagttttttgcgggagagaagacagaaaaagccactccgaaaaaacggaaggatacgcgaaaaaaagggcaggtagccaaaagctcggatgtcaataccgccgtttctttactggtaatattcctttcgcttattgcaattggtccgtatatgagagacaggctgctgtcattcatagaaacattttataccgaatcgctcacaatgaagctctcagaatcaaatgtgcatacattgtttgtcagcttattaaaggatatgggcatgatactcgcaccgatcttgctagttgctcttgttgcaggagtcgtaagcaactatatgcaggttgggttcttattttctgctgaagtgatacagcctaagcttgaaaaactggatccgatcaaaggctttaaacgaatatacagtatgagggcgattgtagagctgattaaatcaattttgaaaatcgtagtcgttggttttgcggcttttgctgtgctttggctgcattatggagaaattctccggcttcctctcctgacacccgaagaggcactttctttcgtttcaaaactcactttgtggatgggactaagcggtgcaggtgcattgttgattcttgctggtctcgactatttatatcagagatttgactatgagaaaaatatcaaaatgtcaaaacaagatataaaagatgagtacaaaaaatctgaaggagacccgattatcaagtctaaaattaaacaaagacagcgggaaatggcgatgaggcggatgatgcaggaagttccaaaagcagatgtcattatcacaaacccgactcactatgcgattgctttgaaatatgatgaagaaaaaatggacgcaccttatattgttgcaaaaggcgtcgaccaccttgcgttaaaaatcaggaaaattgctaaagagcatgatgtcatgatggtagaaaacagaccgcttgcccgtgcgttatatgatcaggtggaaattgaccaggcagtgccggaagaattttttaaagttttagcagaaattctggcttacgtatataaaacaaaacaaaaagtatattgaatttttcgatttaaaaggagagaaaaaacagcatgtcaacaagagatttatccgttttaataagtgttgtcctcattgtggcgatgctggtgattccatttcctccatggctgttaagtattttgatcattattaatatttctcttgcattgatcgtgcttctcaccacaatgaatatgcaggaagcgcttcagttttcgatttttccgtcactgttgctgcttttgaccctatttcgtttgggcttgaacgtctcaactacccgttcaattctttcacacggtgaaggaggtaaagtcgtcgagactttcggaaatttcgttgtcggcggaaatgtattagttggactcgttgtatttatcatccttattattattcagtttatcgtcattacaaaaggtgctgaacgtgtttccgaggttgcagcaaggtttacgctggacgcaatgcctgggaagcagatgagtattgatgctgatttaaacgcagggatgattaccgaacaggaagcgaagcatcgccgcgaaaaagtggcaagagaagcagacttttatggagcaatggacggtgccagtaaatttgtaaaaggtgacgccattgccggaatcatcattgtgatgatcaatattattttcggaatcgtgatcgggatgcttcagcagggcatgtccattcaagaggctgcttcacactttacgatgctgactgtaggggatggaattgtttcgcaaatcccggcactgttaatttctacggctacgggtattgtggtcacaagagctgcctctgaaggaaacttagggcatgacattacaggccagctgtttgcgtatccaaagcttttatacgtcgcagcagctacgatcatgcttttaggtattttcactccgatcggcatccttctgacggggccgcttgcgggattgcttgcttttggcgcatatacactatctaaatcaggtaaggaaaaagaagaagtggatgagattcttgaggaagaggctgaggtggacgagcttaaaagccctgaaagtgttgttcagcttctgcatatagatccgatagaatttgagtttggatatggcctgataccgcttgctgatgccaatcaaggcggtgatttattagaccgaattgttatgatacgccgtcagttggctttggaactcgggcttgtcattcctgtcgtgcgaatcagagataatatagcgttgcagcctaatgaataccgattgaaaattaaaggaaacgaagtagcaaaaggcgagttgttgcttgatcattatttagcgatgtcgcctactcctgaggacgatctcattgaagggattgaaacagtggagccttcattcgggctgccggctaaatggattagcgaagcggtaaaggatgaagccgacatgcttggttatacagtagttgatcctgcatcagtcgtttcaacgcatattacggagaaaattaagcagcatgcccacgaattgatcggaaggcaggagacaaaacagctgatcgatcacttgaaagaatcgtatccagtcctggttgaagaggttacgccgaatccattgtctgtcggtgatattcagaaagtgcttgctaagcttttaaaagaaaaagtttcaattcgaaacttagtaacgatttttgaaacacttgctgactatgggaaattaacaacagattctgatcttttgacagagtatacaagacaagcgcttgctaaacaaattacagcccagtttgccaaagaaaatgaagtgttgaaggttgttacttgttccggccgtgtagaaaaagcaatagcagacggtgtgcagcagacggaacacgggaactatttatcacttgaaccagatatttcagaaagtatagtgcgctctgtcgccaaagaagctgaacagctctcattacgtcaggaaaccgcgattcttctttgctcgccgcctgtcagaatgtatgtgaagcagcttctggaacggtacttccctgatcttccggtactctcttataacgaacttgaggcgaatgttgaggtacaaagcattggagtggtggatatttaatgaaaataaaaaaatttactgctgcttcaatgcaagaagcggcacttctcatcagaaaagagttaggtaatgaagcggtcatattaaattcgaaaaaaattaaaaagcgaaaatggtttggcctcgtcaacaagcctgctgttgaagtaatcgccgtattggatcaggactttcttgagaaaaaaacgcctcagaaggcagctgaaccgaaacaaacattaaaaactccggtcagcagtccaaaaatagaggagagaacatatccccctcaaattccggcgcaacaggagctaggtgatttttcagcatatcaatctgtacttcctgagccgctgcgaaaagcagaaaagcttttgcaagaaacagggatcaaagagtctacgaaaacgaacactctgaaaaaattgcttcgcttctctgttgaagcaggcggcttgactgaagaaaatgttgtcggcaaacttcaggaaatactatgcgatatgctgccctcagcagacaagtggcaggagccaattcattcaaaatatatcgttctctttggttcaacaggggctggtaaaacaactacactggctaaactcgcagccatatctatgcttgaaaaacataaaaaaatcgcttttattacaacagatacgtatcgtattgcagctgttgaacagttgaaaacatacgctgaactgctgcaggctcctctggaagtttgctatacaaaagaagaatttcagcaggcgaaggagctattttctgagtatgatcatgtgtttgttgatacagctggaagaaacttcaaagacccgcaatacattgatgaactgaaagaaacgattccttttgagagcagcattcagtcatttcttgttttatccgcgactgcaaaatatgaagatatgaagcatattgtcaaacggttttcatccgtccctgtcaatcagtatatttttacgaaaatagatgaaacgacttccttaggttctgtatttaatatactggcagaatcaaaaataggtgtcgggtttatgactaacggccagaatgtgcctgaggatatacagactgtatctccacttggttttgtgaggatgctgtgcagatgaacagatatgaccaagcagcaactttacgggcgaaaatggaaaaacgtgagcgcgttctgccaatggtttattcacaaaaagcgaagacacttgctgtcatcagcggcaagggcggtgtcggaaaatccaatattaccttaaatatggcacttgcgctgcaggataaaggtaagaaggtgctgctcatcgaccttgatatcgggatggggaacattgatatattaataggaaattcatcgtctgccacgataatcgatgttttaaccgatcgtcagcctttgctgcagtcattatccgttggcccaaagggtttgcggtatatatcagggggaaccggtcttgatgtgatgtttcagctcgatcagagaaaatggacgttttttgccaatgaactttctcatgcattaagccagttcgattatgtgctgtttgacatgggagcaggcttatcaaaagatcaactgccttttattttatcagcagaagatattttgattattacaactcccgagccgacggccattatggacgcatacagcgctgtcaagcacttggttttgacagaaaataagctttcaatgaaggtggctgtcaatcggtgccgtgaccaaaaggaagggcttgacgcttttgcccgcctctcccgtacaattcatatgtttttggatgttcaggttcagtttgccggttccgtttctgacgatgtgatcgtgagcaaagcggttgtcgaacaggttccttttttcataaaaagccctcaggcaaaagccagccggtcagtccgtattttagcggacgccttgtttgaaagagaagaaacgagacacaaagaagacaaacagacatttattgagaaattatcttcttttttaatgaggagggcttaatttgattcgtgtgcttgtagttgatgattcagcttttatgagaaaaatgataagtgattttctgaccgaagaaaagcagatagaagtaatcggaactgcgagaaacggagaagaagcgcttaagaagattgaattattaaaaccggatgttattactcttgatgttgaaatgccggtcatgaatgggacagatacgctccgcaaaattattgagatttataacttgccggtcattatggtgtctagccagaccgagaaaggtaaagaatgcacaattaattgtttggagatcggtgcctttgactttatcacaaagccatcaggctcaatatctctggatctatacaaaattaaagaacaactagttgagcgtgtcgtcgcggcaggactttccggcaagcggaaacgtcctgtttcccagacagttcggcccgaacctattgtgcgtgctgtcgttaagcctgaattaagcaaaccgaaacctggcacgggcagacaaattgtgtgtatcggcacatcaacaggcggtccacgggcgttacaaaaggtgataccgaagctccctaaggatttgaacgcaccagtggttgtcgttcagcacatgcctgaagggtttactgcttctttggctgatcggctgaatcatttatctgacattcaggtaaaagaagcaaaagatggtgaagcagctcttaacggctgtgtttacatagcaccgggcggaaaaaacatatccgttattaaaaacagcgaaggactccaggttgtgcttgataaccatgacacaccaagccgtcataaaccatctgctgattatttattccgttctgtcgggaaactgacagattatgaaaaagtagcggttatcatgaccggaatgggcagtgacggcactgctggactaaaggacatgctaacagccggcaatgtgaaagccattgcggagtctgaagaatcttgtgtcgtatacgggatgccaaaagctgctgttaaagcgggtctcattcatgagattaaacatgtggaagatatcgcagcatccatcacaagctgtgtgaaaaaagagagggtgtgattcaaatggatatgaatcagtatttagatgtctttattgatgagagtaaagaacatttacaaacatgtaatgaaaagcttcttcttttagagaaagacccgactgatcttcagctcgtacatgatatattcagggctgcccatacattaaaaggaatgagcgcaacgatgggctacacggatttagcacatcttacccatctgcttgaaaacgtgctggatgcaatccgaaacggagacatggaagtcacctcagactggctggatattttgtttgaagctctggatcacctggaagcaatggttcagtctattattgatggcggggatggtaaaagagatatctcagaagtgagtgccaagcttgatgtgaatggtgcgcacgctgaatccgctgcctccgctgaacctgcagaagcacagagttcagcatctgattgggaatatgatgaatttgaacgcacagttatacaagaagcggaggagcaaggcttcaaacgatatgaaatcaagatttctctgaacgaaaactgtatgttaaaagcagttcgtgtctatatggtgtttgaaaaactaaatgaagtcggagaagtagccaaaacaattccaagtgctgaagtgcttgaaacagaagattttggaactgactttcaagtttgtttcttaacacatcaatcagcggaagacattgaacaattaatcaatggcgtgtcggaaattgagcatgttgaagtcattcaaggggctcctttaacatcagctgaaaagcctgaagaatctaagcaagaagattcaccagcagcagctgtacctgcgaagcaggagaaacaaaaacagcctgctaaaaacgatgaacaggcgaagcattcagccggcggatctaaaacaattcgtgtcaacattgacaggcttgattctttaatgaacttatttgaagagcttgtcattgaccgcgggcgtctcgagcagattgcgaaagagcttgagcataatgaactgactgaaacggttgaacgaatgacgagaatttccggagatttgcaatcgattattctgaatatgagaatggtcccggttgaaactgtttttaacagattcccgagaatgattcgccagcttcagaaagagctgaataaaaaaattgaactctcgatcatcggtgcggaaactgaactggatcgtacagtaattgatgaaatcggagatccactcgttcacttgatcagaaacagtattgaccatggtatcgaggcgccggaaacacgtttgcaaaagggaaaaccggaatcaggaaaagttgtgcttaaagcttatcacagcggcaaccatgtctttatcgaagtagaggatgacggcgcaggccttaatcgaaaaaaaattctggaaaaagcgcttgagcgcggggtcataacggaaaaagaagctgaaaccttagaagacaaccaaatttacgaattgatttttgctccggggttctcaactgctgaccaaatttctgatatttccggccgcggtgtaggacttgacgttgtaaaaaacaaactggagtctcttggcggttcagtcagtgtgaaatcagccgagggtcaaggctctctattcagcatccagctgccgcttaccttgtctattatttcagttctgctgattaagttggaagaagagacatttgccattccgatttcttcaatcattgagacagcagttattgacagaaaagacattttgcaaacgcatgaccgtgaagtgattgactttagagggcatattgtccctgtcgtttatttaaaagaagagtttaaaatagaagatacaagaaaagatgcggaacagctccatatcattgtcgtgaaaaaaggcgacaaacctactgcatttgtggtggactcctttattggccagcaggaagttgtgctgaaatcactcggagattatttaacaaacgtctttgcaatttccggagctactattttaggagacggagaagtagcgctcattattgattgtaatgcactgattatttaaccattcgaggaggtgtctcacatgactgcagaaattaaaacaggcgaaaaaatgatagtctttatggtaaatggcaaagaatatgccatttccgtcactcaggtgaaatcaattgaaaaatggcaaaagccaacgagggtacctggcgtcgaaccatatatttgcggggtaatcaatttacgcggggtggtgactccggttattgatttaagaaaacgcctgaatttgccagagtatgaaattacagatgaaacacgaattatcattattgcttatcgtgatattgaagtcggctggattgtggatgaagcgaatgatgtgattaccgtacacgaaagtgaaatagaatctgctccagaaggcgttcagaaagatacggatgtgtcgatcgaacagattgtgaaacaagagaacagactcttaaatattattgatgcgaacgcggttttggataaagaatcatctcagtccgctgtgcccgatcaagcttaatcttaaaggggttatgacatgagtatttttaatggaatcaaagaagagcagatggacattttgcgggaagtcggcaatataggcgccggccactccgcctctgcaatggcccagctgttaaatagaaagatagatatggaagtcccatttgcaaagctgctgtcttttgatgagcttgttgattttttcggcggcgccgatgtcccggttgccagcatctttttaagaatggaaggcgatttaacgggttcaatgttctttataatgcctttttttcaggcggagcagtttatcagagagctgattggaaaccccgattttgacatagaggacttaggtgaagaccacatgagctcatccgctttgcatgaactgggcaatattttagcggggtcatatttaacagctttggcggatttgacgaaactccagctctatccaagtgttcctgaagtctctttggacatgttcggagcagtgatcagcgaagggctgatggagctcagtcaggttggagaacacgccattgttgtcgacacgtcaatttttgaccaaagccatcagcaggagctgaaagcgcatatgtttatgctgccggactatgattcatttgaaaagctctttgtcgccttaggtgcatcattatgagtacaactgaggctgttgttataaaggttgggattgctgacgtgaagatcgcccgcttcccggataccatccggacctctggtttgggctcatgtgtggggctggtgctttatgataaagaaaagcaaacggcgggtcttgttcatgtcatgcttccggattcgacgttatcgaaaactgccgagctcaaccgggctaagtacgctgacaccgccgtacagaccacgattgatatgctgatagaagcgggatgccggaaatttgcattaaaagcaaagctggccggcggatcagagatgtttaaatttaaatcgacaaatgatttgatgaagatcggaccgagaaatgtattagcgataaaagaacagctgtctttatttaatattcctattattagtgaagatacgggcggctcaagcggccggacgatagaatttgaaccgaagtcctgcatgctgcatattcgaactgttaaacaaggtgaaaaaacgatttaattaaggtattagggggataacaatgcaatccttgaattatgaagatcaggtgctttggacgcgctggaaagagtggaaagatcctaaagccggtgacgacttaatgcgccgttacatgccgcttgtcacatatcatgtaggcagaatttctgtcggactgccgaaatcagtgcataaagacgatcttatgagccttggtatgcttggtttatatgatgcccttgaaaaatttgaccccagccgggacttaaaatttgatacctacgcctcgtttagaattcgcggcgcaatcatagacgggcttcgtaaagaagattggctgcccagaacctcgcgcgaaaaaacaaaaaaggttgaagcagcaattgaaaagcttgaacagcggtatcttcggaatgtatcgcccgcggaaattgcagaggaactcggaatgacggtacaggatgtcgtgtcaacaatgaatgaaggtttttttgcaaatctgctgtcaattgatgaaaagctccatgatcaagatgatggggaaaacattcaagtcatgatcagagatgacaaaaatgttccgcctgaagaaaagattatgaaggatgaactgattgcacagcttgcggaaaaaattcacgaactctctgaaaaagaacagctggttgtgagtttgttctacaaagaggagttgacactgacagaaatcggacaagtattaaatctttctacgtcccgcatatctcagatccattcaaaggcattatttaaattaaagaatctgctggaaaaagtgatacaataatgaatttcatggttagcgagtgaaaaacatgtcaacactattatggcttttaagctttacgctccacggcgttcttctgtacgctgtcattatcctgtatacgaggctcgctgcagtgaaagaaacagaaaaacagcaaaaacagatacttgaagagacggaaaacaccttggcggcatttctgcttgaattaaaagaagaaaatgagaaactgatagaaaataaagcttcatctgcaagtcaatacgatgaagaatcccaaaagccaggccttcagccctctgaaacatatcaagagcgggatccagtccaagaggcagagaatcttcctgaacatattgaaggtctgattacagaggttgaccgtcgggaagagatcgtaaacagtgaggtccaatcatttgaagaccaggtcatagaattatatgaacagggatattcggcaagtcaaattgcccagaaaatgaagagcggaaagacagaaatcgagctatttttaaaatttcgctccaaaggtgtaaaggattcttgattgtcggataaagctgtgttatattatgtcttggtgttaaatacacacgcttaacgatttatgcagagggtgctgcaggcggcagttctgcacaaaaatgacctaagcggaggaaaaaaaccattatattaggaggaaataacatgtcagtcatttctatgaagcaattgcttgaagctggtgttcacttcggtcaccaaacacgccgttggaacccaaaaatgaagcgttacattttcacggagcgtaacggaatctacatcattgaccttcaaaaaacagtcaaaaaagtagaggaagcttacaacttcactaaaaatcttgctgctgaaggcggaaaaatccttttcgtcggaacaaaaaaacaagctcaagattctgttaaagaagaagctcaacgctctggcatgtactatgtcaaccaacgctggttgggcggtacattaacaaactttgaaacaatccaaaaacgtattaaacgtcttaaagacattgaaaaaatgcaagaaaacggtacgtttgatgtacttcctaaaaaagaagtcgttcaattgaaaaaagaattagagcgtcttgaaaaattcctaggcggaattaaagatatgaaggatcttcctgatgcattattcatcatcgatcctcgcaaagagcgcatcgctgttgcggaagctcgcaaattaaacatccctatcatcggtatcgtagatactaactgtgatccagatgaaatcgatgttgttatcccagcgaacgatgacgctatccgcgctgttaaacttctaacttctaaaatggcagatgcaatcttagaagcgaagcaaggcgaagaagaagcggaagttgctgaagaaactgcaccagaaacagaaacaacaactgcgtaacctattcaaaaggtgataagagggactgccttttatcaccttttttcaagaaaaatgtgtaatatacatactcttgtttaaacatataaggaggaatacaaatggcaattactgcacagcaagtaaaagaactgcgtgaaaaaactggcgcgggcatgatggattgtaaaaaagcgttaactgaaactgacggagatatggacaaagcaattgaccttttaagagaaaaaggaattgcaaaagcagcgaaaaaagctgaccgtatcgcagcagaaggttctactcttattaaaactgacggcaacaaaggcgttatcctagaagtaaactctgaaactgatttcgttgcgaaaaacgaaggttttaaagagcttcttaacactttagctgaccaccttcttgcaaacacgccagctgatgttgaagaagcaatgggccaaaaaatggaaaatggctcaactgttgaagagtacatcacaagcgcagttgctaaaatcggtgagaaaatcactcttcgccgctttacagttcttacaaaagacgacagctctgcattcggtgcgtaccttcacatgggcggccgcatcggtgtattaactgttctcaacggtacaactgatgaagaaactgcgaaagatatcgcaatgcacgttgctgcagttaaccctcgttacatttctcgtgatcaagtatctgaagaagaaacaaatcatgagcgtcaaatcttaactcagcaagccctccaagaaggcaaacctgaaaacatcgtagcgaaaatggttgaaggccgtctgaacaaattcttcgaagaaatttgtctattagaccaagcgttcgttaaaaacccagatgaaaaagtgaaacaagttattgcagcgaaaaacgctactgttcaaacttttgtccgctatgaagttggagaaggcatcgaaaaacgtcaagaaaactttgctgaagaagtaatgaaccaagtgaaaaaataatggtgaaaagatttcgcggctaagtcgcgtcttttcaggcagtataggggacacattttgtgttccctatttttaaaactatatttacaaacctttttttctcttgcataatagaaaacggcaatgtttacacttggaggttatcatggaaaaaccaaaatacaaacgtatcgtattaaagcttagcggggaagcattggcaggagaacagggaaatggaattaacccgactgtcattcaatccattgcaaagcaagtgaaggaaatcgctgagcttgaagtcgaagtggctgttgttgtaggcggcggcaacttatggcgcggaaaaacaggaagtgacctgggcatggaccgcgcgactgctgactatatgggaatgctggcgacagtaatgaattcgcttgctcttcaagacagcttggaaacactcggaatccagtccagagtgcaaacatccattgaaatgagacaagttgctgaaccgtacataagaagaaaagcgatacgccacttagagaaaaaacgtgtcgttattttcgctgcgggcacaggaaacccatatttctcaactgatacgacagctgcactgcgggctgctgaaattgaggcagacgttattttaatggctaaaaataacgttgacggtgtgtataatgctgatcctagaaaagatgaatcagctgttaagtatgaatcactttcttatcttgacgttcttaaagacggcctggaagtcatggattcaacagcttcctctttatgcatggacaatgacattccgcttatcgtcttttctattatggaagaaggaaatatcaaacgtgccgttatcggtgaatcaatcggaacgatcgtgagggggaaataacgtgtcaaaagaagtattaactcaaacaaaagaaaaaatggaaaaagcaattgctgcttatcagcgcgaattggctactgtacgcgcaggccgtgcaaatccatcattattagataaagtaacggttgaatattacggagcgcagacacctttaaatcagttgtcttctattaacgtgcctgaagctcgtatgctcgttatcacaccatacgataaaacagcaatcggcgatatcgaaaaagcgattttaaaagctgatttaggtcttacaccaacaagtgacggcaatatgattcgaattgcaattccggcactaacagaagagagacggaaagaattagtgaaagttgtaaaaaaatatgctgaagaagcaaaagtagctgttcgtaacgttcgccgtgatgctaacgatgatctcaaaaaacttgagaaaaacggagacattactgaggatgaactgcgtgcttccactgaagacgttcaaaaactgacagatgaatatgtgtcaaaaattgacagtgtcacaaaagacaaagaaaaagaaatcatggaagtttaatgaaaaactatgtacaatagataatagtgaaaagaccctctcatgtttacagggggtttttttgttaatactgttgattacattgattatcagcagggaatgtaacctttttgggtgacggaggaatctcatgctcaacatactcaaaaattggaagaatcagcaaactgcggcttccaacttagaacgttatacaaaagaagacatacttaagggagaaattcccgaacacatcgccattatcatggatggaaatggccgttgggctaaaaaacgctctcttcccagaattgcaggccaccatgaagggatgaaggtggtaaaaaggaccacgaagctcgcaaacgaattaggtgtcaaagtactgacattgtatgcattttcaacagaaaactggaaaagaccgaaaatggaggtcgattttttaatgaagcttccggaagaatttttgaatacgtatcttccagagcttgttgaggaaaatgtacaggttcggatcattggggatgaaacggctttgccggcgcacacattacgtgcgattgaaaaagctgtacaggacacggcgcaaaacgacggaatgatccttaattttgctcttaactatggaggccgtactgaaattgtcagtgctgcaaaatcactcgcggaaaaagtgaaggaaggctctttgaatattgaagacattgatgaatcgcttttttctacttatttgatgactgaatctttgcaggatcctgaacttttaattcgaacgagcggcgagataaggctgagtaattttatgctatggcaggttgcctacagtgaatttgtctttactgacgtcttgtggcctgactttaaagaagatcacttcttgcaggcgttaggagagtttcagcagagaggccggaggtttggcggaatttagaggatggtggacatgaaacaaagaattttgacaggtgttctggcagcaattgtatttttatttttggttattgtcgggaaattgccgttcaccatattaatttatgctatgagcagtgtggcgctttttgaacttttacggatgaaaaagctgaagctggtttcactgcctggtttgatcggtcttttattattgtggatgttcttattgccaagccagtattcgttttttgaagcggacgggatttccaaaatggaaatagctttatttgcggtactgctattgctgacttacacagtgttggtcaagaacacctttacttttgatgaagtcgggtttattacgcttgcagcaatttacatcggaatgtgttttcattattttatcgaaatcagaaatcttgaccaatacggattaacatacattttttatgcgtgtgttgtcatttggtccaccgattccggtgcctattttgtcggtaaatcgcttgggaagcggaaactgtggcctgaaatcagtccgaataaaacagtggaagggtttgcaggcggaattgtcatcgcacttgtattggcgacgatttttcagcttgttgcacaacttccgatcccgtatatctatctgctgttgatcacgctgtttttgtctgtttttggacaactgggagatttagtggaatccgccttgaaaagacattacgatgtaaaggattctgggaatattcttcccgggcatggcggtatattagaccgttttgacagtttcttgtttgtcatgcctttcttgtactttctgcttgcccttttttcataaaaaagtctaatatgaatatgagactgatcatgcagcaataagaataggagtagtggcaactttgaaaaatatttgtcttttaggagcaacaggatcaatcggcgaacagactcttgatgtactgcgtgcacatcaagaccaatttcagctggtatctatgtcgtttggcagaaatattgataaggccgttccaatgattgaggtctttcagccgaagtttgtctctgtcggtgatctggatacatatcataaattaaaacaaatgtctttttcttttgaatgccaaatcgggctgggagaagaaggactgatagaagcagcagtgatggaggaggttgacattgttgtcaacgctttgcttggaagcgtcggtcttatcccgacattaaaggcaattgaacagaaaaaaacaattgcgcttgcaaataaggaaactcttgtcactgcagggcatatagtaaaagaacatgctaagaaatatgatgttccgctgctgcctgttgacagtgagcattcagccatttttcaagctcttcaaggcgaacaggctaaaaacattgaacgcctcatcattacggcatccggcggaagttttcgggacaagacgcgggaggagctcgaatcagtaacagttgaagatgcattaaaacatccaaactggtcaatgggtgcaaaaattacaattgattcggctacaatgatgaataagggattagaggtgatcgaggcacactggcttttcgatataccttatgaacaaattgatgtggttttacataaggagagcatcatccattcaatggttgagttccatgataaaagtgtgatcgcacagctcggaactccggatatgagagtccccattcaatatgcgctcacttatcctgaccgattgccattaccagatgcgaaaaggcttgaattatgggaaatcggcagccttcattttgagaaagctgattttgacaggttccgatgcttacaatttgcttttgaatcaggtaaaataggaggaacaatgccgacagtgctaaatgcggcaaacgaagtagctgtcgctgcctttttagctggcaagataccgtttttggctattgaagactgtatcgaaaaggcactaacccgccatcaattactgaaaaaaccgagcctggcggacattcaagaagtggacaaagatacccggggatacgtcaattcaatactcacataaggtggtatgttcgtgaatacagttatagcgtttatcattattttcggaacgctcgttttcttccatgaactgggccatttattgctagcccaaagagcgggaattctctgccgtgaatttgcgatcggcttcggtccaaagattttttctttcaaaaaaaatgaaacagtttatacgatcaggctgcttccggtcggcggatttgttcgtatggccggcgaagatccggaaatgattgaggtgaaacccggatacacggtcgggcttctgtttaataaagaagatcaagttgagaaagtcatcatcaatcaaaaggaaaaatatccggatgctttagtcattgaagtggaaacagcggatctagagcatgacatgaagatcactggttatgaacaggggaaagaggacgaactttccagctttactgtcagcgaaacatccttttttattgtagacggagaagaagtgcagattgcgccgtataatcgccaatttggttccaaacctgtatggcagcggattaaagcaattgctgcagggccgattatgaactttattttagcttacgtcattttagtgatgcttgggctgattcaaggcgtaccgtcaaatgaacctatgctcgggcagctgacagacaatggacgggcggctgaagcagggctaaaagaaggggattatatccaaagcattaacggagagaaaatgaggtcttggactgacattgtctccgctgtaaaagaaaacccggagaaagaaatggacgttgcagtaaaaagagataacaaaacgcttcatatttcggtgactccggaagctgttaaagatgagaacaaaaaaacaatcggacgtttcggttcctatgcgccgactgaaaaaggcgtactctcagcggttgcttacggcgcgacatcaacagttgatgtcaccaaagccattttaaccaatctgagcaaattagtaacaggccaatttaaactcgatatgctgtcaggtcctgtcggcatatatgacatgacagaccaagtggcgaaaacagggatcgtgaacttatttcagtttgcggcgtttttaagcattaaccttgggattgtcaacctgcttccgattccggcacttgacggaggaagactgttgtttctatttattgaagcgattcggggcaaaccgattaacagggaaaaagaagcatttgttgtgtttatcggagtagctttcttaatgcttcttatgctggttgtcacatggaacgatatccagcggctgtttttgtaaacgaaaagtaaatcaatcagaggtgcgaagaaatgagacaaagcttgacgcttattcctacgctccgtgaagttccagctgatgccgaagcaaaaagtcatcagcttcttctgagagcaggatttatcagacagaatacgagcggggtatacagctatatgcctcttgcgtataaggtgattcaaaacattcagcagattgttcgagaggaaatggagaaaattgatgccgtagaaatgctcatgcccgcattgcagcaggcagagacatggcaggaatcaggcagatggtatacgtatggtcccgaactgatgagactaaaagaccgtcatggccgtgaatttgctttaggggcaacgcatgaagaggttatcacttcgcttgttcgcgatgaggttaaatcttataagcgtctccctctgactctttatcaaattcagtctaagttcagagatgaaaaacgtcctcgcttcggtttgttaagaggccgcgaatttattatgaaggatgcgtactctttccatgcatctgcagagagcctggatgaaacgtatcaaaaaatgtacgaggcctattctaatatttttgcccgctgcggcattaatgtaagacctgttatcgctgattcaggcgcaatgggaggaaaggatacgcacgaatttatggcactttctgcgatcggagaggatacgattgcgtattctgatgaatcacagtacgcggctaatatcgagatggctgaagttcttcaccaggaagttccttcagatgaagagcctaaagctctagagaaggttcatacgcctaacgtgaaaacaatcgaagaactgactgcgttcttacaggtttcggctgaagcgtgcattaagtcagtattgtttaaagctgatgaccgttttgtcttagtgcttgtaagaggggatcatgaagttaacgatattaaagtgaaaaacttgcttcatgcagaagttgtagagcttgctacacatgaagaggtcattcagcagctcggaacagagccaggctttgtaggccctgtcggtattcatcaggatgtggaagtatatgccgatcaagctgtgaaagcaatggttaatgctgttgccggggcaaatgaaggagatcatcattataaaaatgtcaatgtgaatcgtgacgcgcaaattaaagaatttgctgatcttcgttttattaaagaaggtgatccttcaccagacggcaagggaacgatccgttttgctgagggaatcgaagtcggacaagtctttaagctcggaacacgctattcagaagcgatgaatgcgacatatttagatgaaaacggacgcgcgcagccaatgctgatgggctgttacggaatcggtgtgtcaagaacgctttctgctattgctgaacagcatcacgacgaaaaaggcttaatatggccaaaaagcgttgcgccgtacgatcttcatattcttgctttgaacatgaaaaacgatgggcaaagagagcttgctgaaaagctgtatgccgatttaaaagcggaaggctatgaagtgctctatgatgaccgtgctgagcgtgccggcgtaaaattcgctgattcagatttaatcggccttccaatccgcatcactgtcggaaaacgagctgacgaaggaatcgtcgaagtgaaaattcgtcaaactggtgagtcaactgagatttcagtagacgaattatctgcgtttatcagcaagcagtaatcaccataacgatttatcaaaaaacatgttaaaatagaaataatagaaggtacctcattgcctgaggtaccttcacttatgatgtttttagggagggatactgtcttaatggaacagttatcagtaaacagaaggcagtttcaaattcttctgcagcagattaatatgacagatgataccttcatgacatactttgaacatggcgagattaaaaagctgacaattcacaaagcttctaagtcttggcattttcattttcaatttaaatctttgctgccttttcaaatatatgacacattaacaacgaggctgacgcaatcgtttgcccacatagcaaaagtgacatcttcaattgaagttcaggatgccgaggtcagtgaaagtatcgttcaagactactggtcacgctgcattgaagaactgcagggcatttcgccgccgattatcagtcttttaaaccagcaaaaaccgaagctgaagggcaataaactgattgtcaaaaccaaaacggatacagaagcggctgcgctaaaaaacaaatacagttccatgattcaagcaggctaccgtcaatttggctttccggatcttcagcttgatgctgaaatatttgtatccgagcaggaagttcaaaagtttcgggaacaaaagcttgcggaagaccaagagcgggcgatgcaggccttgattgaaatggagaagaaagataaagaaagtgatgaagaccaagcaccatctggtcctcttgttatcggttatcaaattaaagataacgaggaaatccggacacttgacagcatcatggacgaagaacggagaattacggtccaaggttatgtgtttgatgtggagacgcgcgagctgaagagcgggcgcacgctgtgtatcttcaaaattacagactatacaaatagtattttgatcaaaatgtttgcacgtgaaaaagaagatgcggcactgatgaagtctctgaaaaaaggaatgtgggtaaaagcacgcggaagcattcaaaatgatacatttgtcagagaccttgtcatgatcgcaaatgacgtaaacgaaataaaagcaaaaacccgtgaagattcagcacctgaaggagaaaaaagagtggaattgcatcttcattccccaatgagccaaatggatgctgttacgggtatcggaaagcttgtcgaacaggcgaaaaaatgggggcatgaggccatcgctttgactgaccatgctgtcgttcaatcctttcctgatgcgtattctgcggcaaaaaagcatggaattaaaatgatttacgggatggaagcgaatctcgtggatgatggcgtgccaattgcttataatgccgcacatcgtctgctcgaagaagaaacatatgttgtttttgacgttgagacgacaggattgtctgctgtatacgataccattattgagctggctgcagtaaaagtaaaaggcggagaaattattgataaatttgaggcgtttgcgaacccgcatcgtccgctttccgccacaatcatagagctgacagggatcactgatgatatgctacaagacgctccggatgtcgtagatgtaataagagatttcagagaatggattggcgatgatatccttgtcgctcataatgcaagctttgatatgggattcttaaatgtagcctataaaaagcttcttgaagtcgataaagctaaaaacccagtcattgatacgcttgaacttggacgttttctctatccggaatttaagaaccaccggttgaacacactttgtaaaaagtttgatatcgaactcacacagcatcaccgtgcgatctatgatactgaggcaaccgcttatttgcttctgaaaatgctgaaagacgcagctgaaaaaggcattcagtaccatgatgagttgaatgaaaatatgggtcagtccaatgcttatcaaagatcaagaccgtatcatgcaacattacttgccgtgaacagcacgggacttaaaaatttatttaagcttgtgtcactttctcatattcattatttttacagagtgccgcgtattccgagatctcagcttgagaaatacagggaagggctgctgatcggttctgcctgtgacaggggagaggtttttgagggaatgatgcaaaaatcgcctgaagaggtggaagatatcgcgtcattctatgattaccttgaggttcagccgcctgaagtgtatcgtcacttgctggagcttgaactggtccgtgatgaaaaagcgctgaaagaaattattgcgaatatcacgaagctgggggaaaagcttaataaaccggttgttgctacgggaaatgttcattacttgaatgatgaggataaaatctacagaaagattttaatatcctcacaaggcggggcaaatccgctgaataggcatgaactgccgaaagtgcatttcagaacgacagacgaaatgcttgaagctttttctttcttaggtgaagaaaaagcgaaggagatcgtagtcaccaatacccaaaaggttgcttctttagttgatgacatcaagccgattaaagatgatttatatacgccgaaaatcgaaggcgccgatgaagagatcagagaaatgagctatcagcgtgcaagaagcatttacggggaagagctgcctgaaattgtcgaagcgcggattgaaaaagagttaaagagtattattggccacggatttgctgttatttacttgatctctcacaaacttgtaaaacgttcactagatgacgggtatctcgttggttcccgtggttccgtaggatcttcattagttgcgacacttactgagattactgaggtaaacccgctgccgccgcactatgtttgtcctgagtgtcagcattctgagttctttaatgacggttctgtcggttctggttttgacctgcctgacaagacatgtcctcattgcggaacgcctttgaaaaaagacggccatgatattccatttgaaacgttcttaggatttaaaggggacaaagtacctgatatcgatttgaacttctcaggggaatatcagccgcaagcacacaattacacaaaagtattgttcggagaagacaatgtatatcgtgcgggaacaataggcacggtggcagaaaaaacagcctacggttatgtaaaaggctatgccggagacaacaatcttcatatgcgcggtgccgaaatagatcggctcgtacagggatgcacaggtgtaaaacgtacaactggacaacaccctggcggtattatcgtagttccggattatatggatatttatgatttttcaccgatccagttcccggcagatgccacaggttcagagtggaaaacgactcattttgatttccactccatccatgacaacctgttaaaacttgatattctcggacacgatgacccgactgttattcggatgcttcaagacttaagcggaatagatccgaaaacaattccgacggatgatcctgaagtgatgaagatcttccagggaaccgaatcactcggtgtgactgaagaacagattggctgtaaaacgggcactcttggaattcctgaattcggaacccgatttgtccggcagatgcttgaagatacaaagccgaccactttttctgagctcgttcagatttcaggcttgtctcacggaactgatgtatggcttggcaatgcacaggagctcatccacaataatatttgtgagctgagtgaggttatcggctgccgtgatgacattatggtttatttaatctatcaaggccttgaaccgtcccttgcctttaaaatcatggaattcgtgcgtaaaggaaaaggattaacgcctgaatgggaagaagaaatgaaaaataacaatgtcccagactggtatattgattcctgtaaaaagattaaatacatgttcccgaaagcccacgccgcggcatatgtcttaatggcagtccgcattgcttactttaaagtgcatcatgctcttttgtattatgcggcttattttaccgttcgtgcagatgactttgatatcgatacaatgatcaagggctctacagcaatcagagcggtaatggaggatataaactctaaaggacttgatgcttcaccgaaggaaaagaaccttctgactgttttagaattagcgcttgagatgtgtgagagaggctattcattccaaaaagtcgatttatatcgctccagcgccacagagtttattattgacggcaacagtctaattccgccgtttaactctattccagggttagggacgaacgctgctttgaacattgtaaaagctcgcgaagaaggcgaattcctctcaaaagaagatttgcaaaagagagggaaagtatcaaaaacgattttagagtacttagatcgccacggctgtctggaatcactgcctgatcaaaaccaattgtcactgttctaatatggaatgcagaatttctcagaaattctgcttctatgcatacataagcgcaaaaagtgccatcgtaatattagagtttctgtcacttgcttaggtatgaaggtaagcgtatatccatttgcaataaaaatatggttatggtatagttttattggaaatgctaacgattaccgaggcaaagagtggggaaacccgctcttttgtattgaacaggagaattttgtctcgacatgttcatcgtttactttttagcccctgctcttttgaagcagggtttttatgcagagtgacgagacgaatatgagatcgacagcacaaggaggaagaacatgagcaaaaaagtgactgacaccgttcaagaaatggctcagccaatcgtagacagccttcagctggaactcgttgacattgaatttgtcaaagagggccaaagctggttccttcgcgtgtttattgattccgatgacggtgtggatattgaggaatgtgccaaagtaagcgaagctttaagcgaaaagcttgatgaggcagacccaatcagccaaaattactttcttgaagtctcatctccaggagctgagcgtccgctaaagaaaaaagccgatttcgaaaaatcactaggaaaaaacgtatacattaagacgtatgagcctattgacggcgtaaaagtgtttgaaggtgaactggctgaatttgatggacaaacagtgacagttgagatcacgatcaaaacaagaaagaaacggatcaatattccgtatgaaaagatagctaatgcaagattagctgttacattctaatgaatacaaatgttttaaggggggagaccgttaaatgagcagtgaattattagatgctctcacgattcttgaaaaagaaaaaggcatcagtaaagaaattatcatcgaagcaatcgaagctgcgttaatttctgcttataagcggaattttaatcaagcgcaaaatgtacgggtggatctaaaccgtgaaactggctccatccgtgtatttgcaagaaaagatgtcgttgacgaagtatacgaccagagattagagatctcaattgaagaggcacagggcatccatccggaatatatggtcggcgatgtcgtcgaaatcgaagttacacctaaggatttcgggcgcatagctgctcaaacagcgaagcaggtcgtcacacagcgtgtgcgcgaagctgagcgcggcgtgatctattctgaatttatcgaccgtgaagaagacatcatgacagggatcgtccagcgtctggacaataaatttatctacgtgtctttaggcaaaatagaagccttgctgccggttaatgagcaaatgccgaatgaaagctacaagccccatgaccgcattaaggtatatatcacaaaagtagaaaaaacaacgaagggcccgcagatttatgtgtcaagaacacatccaggcctgttaaagcgtttgtttgaaattgaagtgcctgaaatttatgatggaactgtcgagctaaaatctgttgccagagaagccggcgaccgttcaaaaatttctgttcgcacagatgatcctgacgtggatcctgtcggttcatgcgtagggcctaaaggccagcgtgtgcaagcaatcgtcaatgaattaaaaggtgaaaaaattgatattgtcaactggtccagtgatcctgtagaatttgtcgcgaatgcgctcagcccttccaaagtgcttgatgtcatcgttaatgaagaagaaaaagcgacaactgttattgttcctgattaccagctgtctctggcaattggcaaaagaggacaaaacgcacgcttagctgctaaactgacaggctggaagattgatattaagagcgaaacggacgcaagagaacttggaatctatccgagagaacttgaagaagatgatgagccgctctttacggagcctgaaactgctgaatcggatgaataagaggtgactttaggtgaataaacacaaaaagatcccattacgcaaatgtgtagtgactggtgaaatgaagcctaaaaaggaactgatccgagttgtacggtcgaaagaaggcgaaatctcagtagacccgaccggaaaaaagaatgggcggggtgcttatttaacgctggataaagagtgcatcttagcagcaaaaaagaaaaacactttgcaaaatcaatttcaatcacaaatcgatgaccagattttcgatgaattgctggaactggcggaaaaggtgaaaaaataaaatgtctggaatggaatggtttcccttgctgggtctggccaatcgagctcgtaaggtcgtgtcaggcgaagacttggtaataaaagaaatcaggaatgcgcgtgcaaagcttgtcctgcttacagaggatgcatcatctaacacagcaaaaaaagtaactgacaagtgcaattattataaagtcccttataaaaaagtcgagagtcgcgcggttcttggacgctctatcggtaaagaagcccgtgtcgttgtcgccgtcactgaccaaggttttgcgaataagctgatcagcttgctcgattaatatttttgggggtgaacgaatggctaaaatgagagtatacgaatatgcaaaagcgttaaatgtttcaagtaaggaaattttgaccgcactgaagaacatggatttagaagtgaataatcacatggccatgcttgaagaaaaggccattaaaaagctagatgccaaatataaaaaaggcggcgcagctgctaaatctcaaaagccagcagaaacgaacaaaaacaaacagccacaaggggttaatcagcaatcagctggaaatcaaccaaataaaattcgagacggaaagaagaatgacgtgcagaataatcaatttaacaaaaacaagaagaataacaacaacaaaaaaaataaacgcaacaacaacaataataaaaaccaacatcagcaaaagcctgtaaagccgaaaaaagagcttcctgagaaaattacattctctggcactttaacagttggcgcacttgctgaagagcttggcaaagagccttcagaactcattaaaaagctgatgcttcttggcgtaatggctaccattaaccaagagcttgataaagacacaatcgaactcattgcatcagaatatggtgttgaaacagaagaggtcattgtgcttgaagaaacagagctggaaaaatacgaagagcctgataatgaagaggatcttgaaattcgtcctcctgtcgtgacaatcatgggccacgttgaccatgggaaaacaacgcttcttgacagcatccgtaaaacaaaggttgttgaaggagaagcaggcggaatcactcagcatatcggcgcttatcaaattgaagagaacggcaagaaaatcacgttcttggatacaccgggccacgccgcatttacaacaatgcgtgcacgcggtgcagaagtaactgatattacgattcttgtcgtagctgccgatgacggtgtcatgccgcaaacagttgaagcgattaaccatgcaaaagcagcagaggttccaatcatcgtagctgtgaataaaatagataaagaatccgcaaaccctgaccgtgtgatgcaagaactgacggaatacggtcttgtccctgaagcatggggcggagaaaccatttttgtgccgctttccgctttaactggaaaaggcattgatgagctcgttgaaatgattttgcttgtcagtgaggtagaggaactgaaagcgaatccgaaccgtcaggcaaaaggaacggttattgaagctgaactcgataaaggcagagggtcagttgcgacgttgctcgtacagactggaacactgcatgtcggtgatccgatcgtagtcggcaatacatttggccgtgtccgtgcaatggtcaacgacattggccgccgtgtgaaaactgccggcccgtcaactccggttgaaattaccggtttgaatgatgtccctcaagcgggagaccaattccttgtctttaaggatgaaaaaacagctcgttctgtcggtgaagcccgtgcttcaaaacagcttgaagagcagcgcagcgataaagcgaagctcagtcttgatgatttattcgagcaaattaagcaaggtgatgtaaaagacatcaacctcatcgtaaaagctgacgttcaaggatctgctgaagctttaacggctgcgcttcaaaaaattgaagtagaaggcgttaaagtgaaaatcatccatacaggcgttggtgcgattactgaatctgacattatcttggcatctgcttccaatgcaattgttatcgggtttaatgtgagaccggacggaaatgctaagagtacggctgaagctgaaaatgtagatattcgacttcaccgtatcatttacaaagtaatcgacgagattgaagctgccatgaaaggtatgcttgatcctgaatatgaagaaaaagtaattggtcaagtagaagtacgccaaacattcaaagtatctaaaatcggtacaattgccggcggatatgttactgaaggaaccattacgcgcgacagcggcctccgtttaattcgtgacggcgtcgtcatctttgagggcgaagtagatgttctgaaacgctttaaagacgatgtgaaagaagtttcacaaggctatgaatgtggtattacaattaagaaatacaatgacattcgtgaaggtgacatccttgaagcgtttgtcatgcaagaaattgaaagaacgtgatcggatttgcggagtgtgaatgcatcatttatgatgcaggatcgctaaaagaaaagcgtgccgttctgaagcgggttttaactagggttcaaaacaagttcaatgtttcgatttcggagattggctatcaggacacctggcaaagaaccagcttcggaatcgccgctgtttcttcctctcgcgttcaaacagaaaaagaactgcagcgcgtcctagcgtttatcgattcttttcctgaaattgaacggacgatcactaggacagagtggttttaacttagaggtgattgaattgagtatgagagcaaaccgtgtcggcgagcaaatgaaaaaagaactcggtgatattatcagccgcaagctgaaagacccgagaattggttttctgacagtaacggatgtacgtgtatcaggtgatttgcaaattgcaaaggtgtatatctcggttctcggtgacgagaaaaaacgggaggaagcgctgaaagggctggcaaaagcgaaaggatttatccgatccgaaatcggcagccgcatcagacttcgaaaaacgcctgaaattgaatttgagttcgatgaatcaatcgattacggaaatcggatcgaaacactgattcacgaattacattcagagaaaccatctgaataaaaaaagagaggataggcgtatatcgtctgtcctctttcttcgtttataagaaaaaaactcaaaagaaggagtgaaaggcaaatggttaacggagttctccttttacataaacctgttggcatgacatcgcacgactgtgtcatgaagatccgaaagctgttaaaaacaaaaaaagtaggacatacaggaacgctcgatccggaagtatcaggcgtgcttccgatttgtgtaggaagagcgacaaaaatagtcgaatacttaactgaaaaatctaaaacgtatgatgcagaaataacattgggcttttcaaccacaacagaggatcaaaccggagaaacggtggaaacaaagcctgtcaatcacgacattgataaagcggatgtagaaaaggttttaaacagtttaaaggggaaacaagaacaaattccgcccatgtattccgctgtaaaagtaaacggcaaaaaattatacgaatacgcaagagcagggattgaagtagaacgtccgaaacgtatgataaccattgaagacattgccctgacaacagagattaaacatcatggagaaaccgcaagcttccggtttacagtgacttgctccaaagggacctatgtaaggacgctggcggtcatgatcggagaaaagctcggatatccggcccatatgtctcatttaatccgtacggcatccggagatttttctctcgacgaatgctttacttttgatgaactcgaagcacaggcccaatccggaaccgtggaagagcatacagttcctattgaacgtgcgctcaatcatttgccgaaatggatcataagtgatacattagctaagaaagtagaaaatggggctttgcttgagacgcccgagcagttttctgaaatgacaagtgaagaccgtattgccgtctttactgaatccggaacctgcttggcgatctatttccctcatcctgcaaaaaaagggctgttaaagccggcaaaagtattgatgcaaaaaagcgaacaatagaaaaaaggtgaccgttctgtgaagacgatacatattacacatcctcatcatttaataaaagaggagcaggcaaaatcagtgatggcgttaggttattttgacggcgttcatctcgggcatcaaaaggtaatcggcacagcgaagcaaatagccgaagaaaaaggtctgacattagctgtgatgacctttcatccccatccttctcacgtgttgggcagagataaggaaccaaaggatctgattacgcctcttgaagacaaaataaaccaaattgaacaattaggcacagaagttctgtatgtcgttaaatttaatgaagtgtttgcttctctttctcctaagcagtttatagaccagtatattatcggccttaatgtgcagcacgcagtggcaggctttgactttacgtacggcaaatacggcaagggaacaatgaagaccatgccggatgatttagacggaaaagctgggtgcacaatggtagaaaaattaacggagcaggataaaaaaatcagttcttcgtatatccgtaccgcgcttcaaaacggagatattgaattggcgaatgtcttgcttggacaaccttattttattaaaggaattgtcattcatggtgataaaagagggcggaccatcgggtttccgacagcgaatgtcggtttaaataacagctatatcgttccgcccacaggtgtatatgccgtaaaagcggaagtgaacggcgaagtttacaatggcgtttgcaatattggctataagccaacgttttatgaaaagcgccctgaacagccttccatcgaggtcaatctgtttgatttcgatcaagaggtatatggagccgctataaaaatcgaatggtacaaacggattcggagcgagcggaaattcaatggcatcaaagaattaacagagcaaattgagaaagataagcaggaagccatccgttatttcagcaatttgcggaaataacttgcaacgcacgcaaattttattctaaaatatttgcatataggcacgatttttagtatgatagttttcgtagtcttaaaaccattgcttggcaatccgaagtcaccgacggttgctaggtaactggggctaaatatgatttggaggtgaaacaggatggcaattactcaagagcgtaaaaaccaactcatcaatgagttcaaaacacacgaatctgatactggatctccagaagttcagatcgctatcctaactgactcaattaacaacttgaacgagcatttacgtactcacaagaaagaccaccactcacgtcgcggtcttcttaaaatggtaggtaagcgtcgtaatcttcttacgtatctgcgtaataaagacgtaactcgttaccgtgagttaattaacaaactaggcttacgtcgataatcgtaaaaagcgggaggattcccgcttttttatcgtattaaagcgaaatttcttataacaaatcattgaaatccttttacatactactttgacattgatatgttcaattcatttcgttcataataggagtaattgattatttcacacaacgaagagaggagttcgtaattgtatgggacaagaaaaacatgtctttaccatagattgggccggaagaacgcttaccgttgaaaccggccagcttgccaaacaggcaaatggtgctgtgatgatccgctacggtgatacagcagtacttagtacagcaaccgcttcaaaagaacctaaaccgcttgatttcttccctcttactgtaaactatgaagaaagattatatgcggtagggaaaattccgggcggatttattaaaagagaaggacgtccaagtgaaaaagcggttcttgccagccgtttaattgaccgtccgatccgtcctttgtttgccgatggattccgtaatgaagttcaagtcatcagcattgtcatgagtgttgaccaaaactgctcttcagaaatggctgccatgttcggttcatctcttgcactttctgtatcggatattccgtttgaaggaccgattgcaggggttactgtcggacgcattgatgatcaatttatcattaacccgacagtcgatcagcttgaaaaaagcgatatcaatcttgtcgttgccggcacgaaagatgcgattaacatggtagaagcgggagcggacgaagttcctgaggaaatcatgcttgaggccattatgttcggccatgaagagattaaacgcctgattgcattccaagaagaaattgttgcagcagtcggcaaagagaaatctgaaattaagctctttgaaattgatgaagagcttaatgaaaaagtaaaagctttggcagaagaggatctgctgaaagccatccaagttcatgaaaagcatgcccgtgaagatgccattaacgaagtgaagaacgcagttgtggcaaaattcgaggatgaagaacatgatgaagacacaatcaagcaagtgaagcagattttatccaagcttgtgaaaaatgaagttcgccgcctgattactgaagagaaagtaagaccggacggccgcggtgtcgatcaaatccgtccgctctcttcagaggttggcctcttgccaagaacgcacggttcaggtctatttacaaggggacaaactcaggccctcagcgtatgtacgctaggtgctctgggagatgtgcaaatccttgacggcttaggtgtcgaagagtcgaaacggtttatgcatcattacaacttcccgcaattcagcgttggggaaacaggaccgatgcgcggaccgggacgtcgtgaaatcggacacggagcactgggtgagcgtgcgcttgagccagttattccgtctgaaaaagacttcccttatactgtccgtcttgtttcagaagtgcttgaatcaaacggttctacatctcaagcaagcatttgcgcaagcacacttgcaatgatggatgccggtgtaccgattaaagcgccagttgctggtattgcgatgggtcttgtcaaatcaggcgaacattacactgtcttgactgacatccaaggcatggaagacgcgctcggagatatggactttaaagtagcgggaactgaaaaaggcgtaacggccctgcaaatggacattaaaattgaaggcctttccagagagattcttgaagaagcgcttcagcaggcgaaaaagggcagaatggaaatcctcaacagcatgcttgcaacattaagcgaatcaagaaaagagctttctcgatatgcgcctaagatcttaacaatgaccattaatcctgataaaatccgcgatgtcatcggaccaagcgggaaacaaatcaataagatcatcgaagaaaccggtgttaaaattgatattgagcaggacggcacaatctttatttcctctacagatgaaagcggcaaccaaaaagcgaaaaaaatcatcgaagaccttgtgagagaggttgaagtcggccaactttacctaggtaaagtgaaacggattgaaaaattcggggctttcgttgaaattttcagcggaaaagacggtttggtgcacatttcagagcttgcgcttgaacgcgtagggaaagttgaagatgttgtgaaaatcggagacgagattcttgtcaaagtcactgaaattgataaacaaggacgagtgaatttatcccgcaaagcggtgctccgtgaagagaaagaaaaagaagaacaacaatcttaaatgaaaacataaaaggagcctgggagacccggcttctttattttgaagcttttcaaaagcaggcgggttctaccttgtccctctccttcataatgtgagatgaggggggacagaacatgtacaaaaaatttgtaccgtttgccgtttttttatttcttttttttgtctcatttgagatgatggaaaatccgcatgcacttgattatataggggcaatgaaaaaagatacggtgactgtcacggcgtcaaaagacccgttatatgaagaattgcttcaaaaagcgccggagtacgaagttaagccccagaatgcaagaattgataaagtgtggaaaagcattccaggctacaatggattaaaggtcaatattgaacaatcatataaaaaaatgaaacagcatggtgagtttcgggaaaaagatttggtgtacagtcaagtaaaaccaagtgttcatcttgagtcacttcagcctgagcctatttataaaggaaatcctgacaaaccgatggtggcttttttaatcaatgtggcatggggaaatgagtatttggaaaaaatgcttcctattctgcaaaagcaccaggttaaagctacgttctttttagaaggcaattgggtgagaaacaatgtacagctcgctaagaagattgcaaaagacggacatgaaatcggaaatcattcatacaatcatccggatatgagcaaactgactacaggaagaatttccgagcagctcgacaagactaatgaacaaatagaacaaacgatcggcgttaagccaaagtggttcgctccgccaagcggaagtttcagaaaagcggttatcgacattgcagcagagaaacagatgggaacagtcatgtggacagttgatacaatcgattggcaaaagccggctccgtctgtacttcagacgagagtgttaagcaagatacataatggtgccatgattttaatgcatccgactgaccctacggcggaaagtcttgaagcgctgattacacagataaaagacaaaggatatgcgcttggaacagtcactgaactaatggatgaaacaagactattgaagtaacagatgaaggcagcttgtctttgaataggaggaacaaatttgattaaacgatatacgtgtcaaaatggtgtaagaattgtgctggaaaataacccgacagtccgttctgttgcgatcggcgtatggatcggcacaggttcgagacatgaaacgccggagataaacggaatttctcactttttagagcacatgttctttaaagggacgagcacaaaatctgcacgcgagatagcagaatcttttgatcgtattggcggccaggtcaatgcgtttacttcaaaggaatatacctgctactatgcaaaggtgcttgacgagcatgcgaattacgcgctggacgtattagcagatatgttctttcattcaacgtttgatgaaaacgagctgcaaaaagagaaaaatgtagtatatgaagaaattaaaatgtatgaagatgcgccggacgacattgtacatgatttactgagcaaagccacttacggcaatcattctttaggctacccaattctaggcacggaagaaacgcttgcttcctttaacggtgactctctcagacaatacatgcatgattattatacgccggaccgagtggtgatttcggtagcgggcaatatatctgacagttttatcaaagatgtagaaaaatggttcgggtcatacgaggcgaagggcaaagcgacaggccttgagaagcctgagttccacacggaaaaactgacgagaaaaaaagaaacagagcaggctcatttgtgccttggatttaaaggcttagaggttggccatgaacgtatttatgatttaatcgtcctcaacaatgtgctcggaggcagcatgagcagccggctgttccaagatgtgcgtgaagataaaggacttgcttattctgtttacagctatcacagctcatatgaagacagcggaatgctaacgatttacggcggaacgggtgcaaatcagcttcagcagctgtcggaaacaattcaagaaacccttgccacattaaaacgtgacggcattacctcgaaagaactggaaaacagcaaagagcaaatgaagggaagcttaatgctgagcttagaaagcacaaacagcaaaatgagccgaaacggaaaaaatgaactgctgctcggcaaacataaaacattagatgaaatcatcaatgaattaaacgccgtgaacttagagcgtgttaacggccttgccagacaattgtttactgaagactatgcattagcacttatcagcccttccggcaatatgccgtcttaaaaaggaaagcctgctccataatggagcaggcattttttaatccctttcatcatacatagtacaagggggtgacagacatgcggctcagtgaattatcaggaaaggaaattgtagacatcaaaagagctgaacggctcggagtgctcggccagaccgatttggaaatcaatgaacaggatggacagattacagcactcctcattcccacagttaagtggtttggtttgagaaagcaaggtcatgacattcgtgtcccatggcaccatattcaaaagatcggttcagatatgattatattagatgtacctgaggaaatgcctcctcgacaagagtaaatagcccaattgactgtgaagcgggctctaaagaaaacatctgaaacatcggctgccggagccgatgtttttttatatggaaaaagcgcatcttttatattcaccggtatttccttttgatcataagatgaaggggagcttaacaactagagatccagtatatacaaagaaggtgaacgtttagaatgttaaccggattgaaaattgcagttatcggcggtgacgcaagacagctcgaaattataagaaagctcactgaacagcaggctgacatctatcttgtcggttttgaccaattggatcacggttttaccggggcagtaaaatgcaatattgatgaaattccttttcagcaaatagacagcatcattcttccagtatccgcgacaacaggagaaggtgtcgtatcgactgtattttcgaatgaagaagttgtgttaaaacaggaccatcttgacagaacgcctgcacattgtgtcattttctcaggaatttctaacgcctatttagaaaacattgcagctcaggcaaaaagaaaacttgttaagctgtttgagcgggatgacattgcgatatacaactctattccgacagtagaaggaacgatcatgctggctattcagcacacggattatacgatacacggatcacaggtggccgttctcggtctggggcgcaccgggatgacgattgcccgtacatttgccgcgctcggggcgaatgtaaaagtgggggcaagaagttcagcgcatctggcacgtatcactgaaatggggctcgttccttttcataccgatgagctgaaagagcatgtaaaagatatagatatttgcattaataccataccgagtatgattttaaatcaaacggtactttctagcatgacaccaaaaaccttaatattggatctggcctcacgtcccgggggaacggattttaaatatgccgagaaacaagggattaaagcacttcttgctcccgggcttccagggattgtcgctcctaaaacagctgggcaaatccttgcaaacgtcttgagcaagcttttggctgaaatacaagctgaggaggggaaataaggatgtcgtcattaaaaggaaaaagaatcgggtttgggctgaccgggtcgcattgcacatatgaagcggttttcccgcaaattgaggagttggtcaacgaaggagctgaagtccgtccggttgtcacatttaatgtaaaatctacaaatacccgatttggagagggcgcagaatgggttaaaaaaattgaagacctgactggatatgaggccattgattcgattgtaaaggcagaacctcttgggccgaagctgccccttgactgcatggtcattgcgcctttaacaggcaattcaatgagcaagctggcaaatgccatgacggacagcccggtgctgatggcggcaaaagcgacaatccggaacaatcggcctgtcgttctgggtatctcgacaaatgatgctcttggtttaaacggaacaaatttaatgaggctcatgtcaacaaaaaatatcttttttattccattcgggcaagatgatccatttaaaaaaccgaattcaatggtagccaaaatggatctgcttccgcaaacgattgaaaaggcactcatgcaccagcagcttcagccgattctagttgagaattatcagggaaatgactaaatttacagaaaatctttcccaaactaaaaaattcggtcatagcccgcatattctatggtaaaataaaacgtaaaatcatagtcaaatcaattcaatgaagctgattggcggaaggagttttacagatgggaagaggtttacacgtagctgttgtcggagcgacaggggctgtgggacaacaaatgcttaaaacacttgaagacagaaactttgaaatggacacacttacattgctatcttcaaaacgctctgcggggacaaaagtcacgtttaaaggccaagagctgactgttcaggaagcttctcctgagagctttgaaggggtaaatattgctttgttcagcgccggcggaagcgtatcacaagcattggcaccagaagctgtaaaacgcggcgctattgttatagataatacgagtgcgttccgcatggatgaaaatacaccgcttgttgtgccagaagtgaatgaggcagacttgcatgaacacaacggcattattgccaatccaaactgctctacaatccaaatggttgcggcacttgaaccgatccgcaaagcatatggcttaaacaaggtcatcgtatcaacttaccaggcagtatcaggagcgggtaatgaagctgtaaaagagctttacagccaaacacaggcgattttaaataaagaagaaatagagcctgagatcatgcctgtaaaaggtgacaaaaaacactatcaaatcgccttcaacgcgattccgcaaatcgataaattccaagataacggctatacgtttgaggaaatgaaaatgataaatgaaacgaaaaaaatcatgcacatgcctgaccttcaagtagcggctacatgtgtgagactgccaatccaaactgggcactcagagtccgtctacatcgaaatagaccgtgatgacgctacagttgaagatattaaaaatctattgaaagaagctccgggcgtgacacttcaggatgatccaagccagcagctttatccgatgcctgctgatgctgtcggcaaaaacgatgtgtttgtgggccgcatccgtaaagacttggacagagcaaacggttttcatttatgggttgtttctgataacctattaaaaggcgcggcatggaactctgttcaaattgcagaaagcctgaaaaaactaaacctcgtataaaagagagaattttctaaagacgaatagaagagagtaaggcgctatcagcctgctctcttctgttacgtccgaataatttggagtgaaaacagtgaagataattgttcaaaagttcggcggaacatcagtaaaagatgataaaggccgcaaactggctttagggcatattaaagaagcaatcagtgaaggatataaggttgtcgttgtcgtttcagcgatgggccgaaaaggagacccgtatgcaacagattctttacttgggctgctttacggcgatcagtcagcgatttctcctagggaacaggatttgcttttatcttgcggagagactatttcctctgtcgtctttacaagcatgctgcttgataacggtgtgaaagcagctgcgctgacaggggctcaggctggctttttaacgaatgatcagcataccaatgcgaaaatcattgaaatgaaaccggagcgtttattcagtgtgctcgccaatcatgatgcggtagtcgtcgcaggcttccagggcgcaactgaaaagggtgatacaactacaatcggcagagggggcagcgatacgtctgcagccgcactcggagcagctgttgatgcggaatacatcgatattttcaccgatgtagaaggcgtgatgactgctgacccaagagtggtggaaaatgcaaaaccgcttcctgttgtgacgtatacggaaatctgcaacctggcgtatcagggggccaaggtcattcatccgcgtgctgtggaaatcgcaatgcaggccaaggttccgatccgcgtccgttcgacttattcgaatgataaaggtacattggtgacatcacatcactcttccaaggtcggcagtgatgtttttgaaaggctgattacgggaatcgcccatgtcaaagatgtcacgcagttcaaagtgcctgcgaaaatcggccagtataacgttcagactgaagtgttcaaggctatggcaaacgctggaatcagtgtcgatttctttaacattacacctagtgaaatcgtctatacggtagccggaaataaaacagaaacagctcagcgtattttaatggatatgggctatgatccaatggtgacgagaaactgcgcgaaggtatcggcggtcggcgcgggcattatgggtgttcccggtgttacgtccaaaattgtatcggctctttcagaaaaagaaattccgatccttcagtcggctgacagccatacgacgatatgggtgctcgtccatgaagcggatatggttcctgctgtaaacgctttgcatgaagtgtttgaactttcgaagtaaatgtgattgaatcatgatgaggtgaataaaatgaatttcggaaatgtgtctacagcgatgattacaccctttgacaataaagggaacgtagactttcaaaaactgtctacactgattgattacttgttgaaaaacggaacggattctttagtagtagcgggaacaactggagaatctccgaccctttcaactgaagaaaaaattgcgctttttgaatatacagtaaaagaagtaaacggacgggtgcccgttatcgctggtactggaagcaacaacacgaaagattccattaagctgacaaaaaaagctgaggaagcgggcgtggacgctgttatgcttgttaccccgtattacaataaaccttctcaagaaggaatgtaccagcattttaaagcaattgcggcagagacatctcttccggttatgctctataatgttcctggccgtacggttgcttctcttgctcctgaaacgacgatccgtttggcggcagacattccgaatgtggttgcgattaaagaagcgagcggagacctcgaagcgattacaaaaattattgctgaaacacctgaagacttctatgtctattcaggggatgacgctctgacgcttccaattctttcagttggaggaagaggagttgtgtcagtggcgagccatattgcaggcactgatatgcagcaaatgatcaaaaattatacgaatgggcaaacagctaatgcggcactgattcatcagaaactgctgccgattatgaaggaactgtttaaagcgcctaatcctgctccagtcaaaacagcgcttcagctgagaggtcttgatgtcggttctgtgcgtctgcctctagtcccgttaactgaggatgaacgtctgagcttaagcagcacgatcagcgaactgtaagaaaatttcatacagtgaaacaaacgcggtcattctcacattcagctgagtttgaccgtttcttttacatattggttttccctaaaccttctgctttatcttgttttctaaatttactttcagttataataggaacaagtgatgatggacgggtatgagactaggaggatatagattttgaaaaagaaaaatacagaaaacgttagaattatcgcccttggcggtgtcggagagattgggaagaacctttatgtcattgaaattgactcagacatatttgtcgttgatgccggccttatgcatccagaaaacgaaatgctcggtattgatgtagtgattcctgacatatcatatttgattgaacgggctgaccgcgtcaaggcaatctttttaacgcacgggcacgatgaaaatatcggcggcgttttttacttattaaacaagctgtccgttccagtgtacggaacaaaattgacgcttgcactgttaagagagaaattaaaacaatacggacataaccgaaaaactgatttaagagaaattcactccaaatctgtcattacatttgaatcaacaaaggtatcgttctttagaacgattcacagcattcctgattctgtaggtgtgagctttaaaacatcacttggatctattgtatgcacgggagacttcaaatttgaccaaacacctgcacttaatcagacgtgcgacattggcgagatcgccaagatcggcaatagcggcgtgctcgctctgctttctgacagtgcaaatgcggaacggccgggttacaccccttcggaagcggctgtcagcggagaaatttcggatgcgctgtataattcacagaaccgggtgattattgctgttttcgcatccaatattaaccggattcagcaagtcattcatgcagcggctcaaaatggcagaaagattgccgtagccggaaaaaatcttcaatctgtcctgcagctggcgagaaagttaggatacattgaagcagatgatgaattgtttatttctgtacaggatgtcaaaaaatatccgaagcgcgaagtggccattattacagccggaagccaaggtgaaccattagctgctttgacaagaatggcaaacaaagctcacaaacagctgaacattgaagaaggggatacggtggtcattgcgtcaactccgattcccgggcaggaactcatttactctaaaacagtagatcttcttgcgagagccggtgcacaagtcatctttgcccaaaagcgtgttcatgtatcaggccacggctcacaagaagagttaaagctaatgatcaacctgcttaaaccaaaatatttgattcctgtaaacggcgaatacagaatgcaaaaagctcattcaaaaatcgctgaagaaaccggcatgaagcgcagcgacatcttcttaattgaaaaaggcgacgtcgttgaattccgcggccaaaacgtaaaaattggggataaagttccttacggcaatattttaattgatggtttaggtgtcggtgatatcggcaatatcgtattgagagaccgccgcttgctttcacaggacggaattttaatcgttgtcattacacttgataaacaaaagaaaaatcttgtatcaggaccagaaattatcactcgcggctttgtttatgtaagagagtctgaaggtctaatcgtacaggctactgagctcgtccggtccatcgtgacagaagcgactgaaacatcaaatgtcgaatggtcaacgctgaagcaggcaatgcgggatgctttgaaccaattcctttatgaaaaaacgaaacgtaaaccgatgatcatcccaattattatggaagtataatgactgactaaagaccggagttgctccggtctttattttttgtccttcaagccgggattgaatgaagtatctttgttcataatacaaagagaaactcggaaaggatgaaagcgagatggatcatcgtatggaaaacacagaagaagagcgtcctgaaaaaaatgatgcgaaggacagcattatgaataaaatacagcagcttggtgaaacgacgcttccgcagctgccccaagatacaaatattcattgtctgaccattatcggacaaattgaaggccatgttcagcttcctccgcaaaacaaaacaacaaaatatgaacatgtcatcccgcagattgtggcaattgaacaaaatcccaaaattgaaggcttgctgatcatattaaatactgtcggaggagatgttgaagctggtcttgccatagcggaaatgcttgcatctttatcgaaaccgaccgtttctatcgtgcttggcggggggcattccatcggcgttccgattgctgtatcctgtgattacagctatatcgccgaaacagcaacgatgacgattcatccagttaggctcaccgggctggtcatcggggtgccgcaaacgtttgaatacctggataagatgcaagaaagagttgttaaatttgtgacaagccattccaatataaccgaagagaaatttaaagagctaatgttttcaaaaggaaacttaacacgcgatatcggaacaaatgtagtcggtaaggatgcagttaaatacggattgatcgatcacgcaggcggtgtcggacaggcaatcaataaactgaatgagctcatcgacgaagcaaggaaagaagaaggacggatgattcaatgattctttataccgtgatgccgcaggaaattgtgtttgcagaacagaaccaagagacaagcgcacatgagcaaattgaatataaaggtgtaccgcttctagtcgaaatgaaagggaatgaagcggaagtcattcaaatcatgagcaccaatccaatgcattttctgcatccggacatttcacccggacaaaagctgaaattaaacgtataagaatccaacccttttttaagggcaaaatatgctataataggggaatcctacagaaaaaacgcagcctgtaaacggctgctttcttcattatgtatgaacttacattttttaacgcagtaaggtgatgagtgtggcaaagaaaaaacgaaaatcaagaaaaaaacaggcgaaacagctaaatataaaatacgagctcaacggattgctgtgtatagccatttcaattatcgcaatcttgcagctgggggtagtcgggcaaacgtttatctatttgttccgcttttttgctggagagtggtttattttatgcttgttaggtttattggtgttaggagtctcactgttttggaagaaaaaaaccccaagccttttaacgagacgaaaggccgggttgtactgtatcatcgcaagcatattgctgctttctcacgtgcagctatttaaaaatttgacgcacaaagggtctattgagtctgcaagcgtggtgcgcaatacgtgggaattgtttttaatggacatgaatggcagctctgcttcacctgatttaggcggagggatgatcggtgcgctgctgtttgcggcttcacactttttgtttgcgtcgactggttctcagatcatggcaattgtcatgattttgatcggaatgattttagtaacaggacgctcgctgcaagaaacgctaaaaaagtggatgagcccgattggacgttttataaaagaacaatggttagcatttattgatgatatgaaatccttcaaatcaaatatgcagtcatcgaaaaaaacgaaagcgccgagcaaaaaacaaaaaccggcccgcaaaaaacagcaaatggaaccggagcctcctgatgaagagggggattatgaaacagtatcgcctcttattcattcagagccgattatctcaagcttttctgatcgtaatgaagaggaagagtctccagttatagaaaagcgccccgtacctgtgtcgaagccgcttcaggacatccaaccggagacaggtgatcaggaaactgtttctgctcctcctatgacctttacagagcttgaaaataaggattacgagatgccgtcactggatttgctggcagatccgaagcataccggccagcaggctgataaaaagaatatttatgaaaatgccagaaagcttgaacgcacattccaaagctttggcgtaaaggcgaaagtcacacaggttcatctcggaccggctgtaacaaaatatgaagtatatcctgatgtcggagtgaaggttagcaaaattgtcaatttaagcgatgatttagcgcttgcgcttgctgcgaaggatatcaggatcgaagcgcctataccaggcaaatcagcaatcggaattgaagttccaaacgcagaagtggcaatggtttcgctgaaagaagtgctggagtctaaattgaatgacagaccggatgcgaagctgttaattggactcggccgcaatatttcaggtgaagctgtattggctgagttaaacaagatgccccaccttttggtcgcaggcgcaaccggtagcgggaaaagtgtctgtgtcaacggcattattacaagtattttaatgcgggcgaaaccgcatgaagtgaaaatgatgatgatcgatcctaaaatggtagagctaaatgtctacaacgggattccgcatttgcttgctcctgttgtaaccgatccgaaaaaagcgtcgcaggctttgaaaaaggttgtcaatgaaatggagcggcggtacgaattattttctcatacgggtacaagaaatattgaaggatacaatgattatataaaacgcgccaacaatgaagaaggagcgaaacagccagagctgccttatattgttgtcattgtggacgagctagccgatctcatgatggtcgcttcatctgatgtggaagattcgattacgagattgtcccaaatggcgcgggctgccggcatccatcttattattgcgacacagcggccatcggtggatgttatcacaggggtgatcaaagcgaacattccgtcacgaatcgcgttcagcgtatcttcacagacggattcaaggaccattcttgacatgggtggcgctgagaagcttcttggccgcggcgatatgctgtttttacctgtaggggctaacaaacctgtccgtgtgcagggagcatttttgtcggatgacgaagtggagaaggtcgtcgaccatgtgattacgcagcagaaagcgcaatatcaagaagaaatgattcctgaggagacaacagaaactcattccgaggttactgatgaactttatgatgaagctgttgaattaatcgtcggcatgcagacggcatctgtttcaatgctgcaaagaagattcagaatcggctatacgagagcggcgcgcctgattgacgcaatggaggaacgcggtgttgtcggaccgtatgaaggcagcaaacctagggaagtattattatcaaaagagaaatatgatgagctctcttcttaatgaagggagttccgctctctatagttgtcaataataacattatgtaaactgatcacctttctatttattttttcgacaaaacatgatatagttgtcccaattgttcaataatttttatcgaaagtggtttacggaggggaaacatgtctacaaaagctgataatcggcacttgtatttgaaagtaattgaacgaattaaagaggatataaaaaatgggatctacactgagaaggaaaagctgccttctgaatttgagctttccaaaaagcttggtgtcagcagagcgacgctaagagaagccttgcggatactggaagaagagcatgtgattatcagaaggcatggtgtaggcacttttgtccattctaagccgttatttctttcgggcattgaacagctgaacagtgtaaccaagatgatagaacaggcgaatatgacccctggcacgatttttctatcatcacaagtgcttatgccgtctgaagatgatacgaagagatttcatttggcagaagggcaagaacttttttaccttgaacgagtcaggacagctgacggacagccgattgtgtattgtatagacaaaattccgatgaatattttgccgaattctttttctcatcagcaagaatctatgtttgaccttcttgagaaaaattcaggctccgtaatcagctatgcagtaactgatatagaaccgatcggctatcacgataccatttctccagtgcttgaatgcgatcctgaaacagcccttttgctgttaaaacaaacccattacgatcagcacgataaaccggtgctttattctttaaattattttagagcggataaattcagatttcatgttttgcgtaaacgattctaaaaacggacgcctgtatgtgtctgtttttttatttgcactgattcatgtttctttgtacatactttcattccggttaacgcaatatataagggatgacaagaaagtgaatgggtgaaaatgttgagagagaaaaatggaatgaaaaatattattgcattgtcttctgtcccgcttgtgatgacactcgggaactccatgctgattcctgttcttccgatgatggagaaaaagctgtctgtgacttcatttcaagtatctttaatcattactgtatattcagtagtagcaattatttgcattccgattgccggatatttgtcggatcgtttcgggagaaaaaaaatattgcttccatgcctcctcattgcaggattggggggagccgtagctgcttttgcctcgacctatatgaaaaatccttatgctatgatcttggcggggcgggttcttcaaggcattggttctgcaggtgccgctccgattgtcatgccgtttatcggcgacctgtttaaaggagacgatgaaaaggtcagcgcgggtcttggcgatattgaaaccgccaacacgtcagggaaggtactgagtcccatacttggagccttactggcttcttggtattggtttgtaccgttttggtttattccgtttttctgtttgatcagctttttgctcgtattgtttttggtggccaagcctgaagaagatgaagatgcgcctgctgtttctgagtttattaagagtgtgaagaaaatttttaaacaggatggtcgctggctttatacggtcttcattatcgggtgtgtcattatgtttttgttatttggcgtattattttatttatcagatacgctggagaacaagtatgctattgacggagtagctaaaggcggattactggcaatcccacttttgtttttgtcaaccagttcttttatagctggcaaaaagatcggtaaagataaaggccgaatgaaattttgcgttgttacaggaatgattctgttaaccctttcgtttattgccttgtggtggaaccacagtttttattttttatttgtctttttaagctttggcgggattgggattggaatggctcttcctgctttagatgcattgataaccgaagggattgaaagtgaacaatgcggaaccatttcctccttctacaatagcatgcgctttataggagtagctctcggtccacctgtttttgctgcattaatgtctaatgcaaactggattattttcatactctcggcgttttgcagcatcgtttctttatttttagtgctctttactgtagatgctaaaaaaagtgaagaagaagaaaaaaacttagggacggtctagccagccgtctttttttgcgcttccttgcacagtttacaactgtacctatacagcatgcggaggttattgtttccttataaatcctacagttgctataattacatgaaagagtgtttctgcgaatgctgaaaattggtcataatacatactaattaagaaatgaacgaaggaggttccatatgtcatatgttaatgaactcaaatcaaagcacggcggtttaaccgcacacattgtaaaaacagaaaaattcaaaaccgtctcgcttatttttaagatgcttgcgccgctgacaaaggatcaagtcaccaaaagagcgctgcttccgcatgtgcttcttcgcggaacgaaaagccatccgaaaaccgcagaattgcgttcatacctggatgagctgtacggcacgtcagtatcggctgaccttacgaaaaaaggagagcggcacgtcattacgttcaggcttgaaatcccgaatgaaaaatatttaaaagaccaaacgccgctacttgagaaagggctccagcttcttgcagaaatcgtcttttcacctgctttagagggagacgcttttcagtcacaatatgtggctcaagaaaaacggacgcttaagcaaagaatccaagccgtctatgatgataaaatgcgctattcgaatttaaggctgatacaggaaatgtgcaaaaatgagccttacgcgcttcatgtcaatggtgaaatcgacgatgttgatgacattacggcagagcaattatacgaaacataccaaagcgctatccaaaaagaccagcttgatctatatgttgttggcgatgtggacagtaaccaggtacaatcggcaattgataagtatttcaaaacagaagagcgcactcttggcacgattgaaaacaatcacgctgatgaaaaagttcagccaaaagaagtaattgatgaagaggatgtcaagcaaggaaaactgaatatcggctaccgcaccagcatcacttatacagatcaggattatcctgctttacaagtgtttaacggattgttcggcggattctctcattctaaacttttcattaatgttcgggaaaaagccagtcttgcttactacgcggcttcccgtatagaaagttttaaaggcttgttaatggtgatgtcaggcattgaagtgaaaaattttgaacaggcggtttcgattattgctgagcaattccaggcaatgaaaaatggcgatttcagtgagcaggatatagcacagacaaaggccgtcattcgaaatcaagtgctggaaacgattgatacagcatacggtttatctgaatttttatatcagcaggctgctgctcaagtcgagattcctatcgaagactttcttgccaatattgagaatgtcacaaaagaggatatcattaaagccggcgaaaagattcagcttgatacgacttatttcttaaaagggacggagggtgcatcttgatcaaaccaatcgaatatgaacagcttcaggagacgctgtatcatgaaaaaatgtccaacggccttgatgtttacgttttgccgaaaaaaggcttcaacaagacatatgcggtctttacaacaaagtacggctcgatagataaccggtttgtccctttaggtaaaaacgagatggttcacgtgccggacgggattgctcactttcttgagcacaagctgtttgagaaagcggacggagacgtttttcaagatttcagtaaacagggggcttctgccaatgcgtttacgtcatttacaagaacggcttaccttttctcaagcacatcaaatgttgaacgcaatttagagacgcttatcgattttgtacaggacccatattttactgaaaaaacggttgaaaaggaaaaagggattatcgggcaggagattaatatgtacgacgataaccctgattggaggctttacttcggggtcattgaaaacatgtacaaagagcatcctgtcagaattgacatagcgggaacagtggaaagcatttcacatattacaaaagaccttctttatgaatgctatgaaacgttttatcacccgagtaacatgctccttttcattgtcggccctgtagatcctgaagcgattatttctcaggtaagagaaaaccaggggaaaaagccgtatactgatcagccggagatcaaacggaaagaagtgaaagagcaagaagcggttttccgaaaagaaaaagagatcaaaatgaacgtgcagggaccgaaatgccttgttgggctgaaatccaaaaatccgtttaaattaggcaaagagctcttaaagcatgaactttcaatgaacttattgcttgaagctctttttggcaaaagctctgcccagtatgaatcactttatgaaaaaggatatattgacgaaacgtttagctttgattttactgctgaatatgggttcggttttgcggcgatcggcggagatacgcctgagcctgatcaattagctgaagacatttcaagcatgcttttgcgcgccggtgaactgattactgctgaaaagattgaacttgccagaaagaaaaagatcggcacattcttaaaagcgctgaattcccctgaatacatcgccaatcaatttacccgttatgcgttcttggatatgagcctgtttgacgttgtaacggtactcgagcagattaccctcgaggatgtccagaacgtaatacaagaggaaatcgctgcagacaggctgactgtctgcaaggttgttcctaaatcataaacaaaacatccctccagtgtgaggggtgtttttctgcggaaagaaggaaagagaatgaacaaaacagcactaatcaccggagcaagcggcggcattggcaaaagcatcagcgaaacccttgcggctaaggggtacaatctgctgctgcattacaatacaaatcaaaatgcggcagcggagcttgctgaaaaactaagtcagatgtttggcgtaaatacggagatattacaagctgatctgtccgcgcaagatggagcagataagctgacaagttcaattgttcagccggttgatgcgattgttttaaacagcggacgaagccattttgggctgattacggatgtagataacgcaacggttcaggaaatggttcagcttcatgtagcgagtccgtatatgctgacgagaaaccttctgccaggcatgattcggaataaatcgggagcgattgtggctgtcagctcgatttggggagagactggggcatcctgtgaagtgctgtacagcatggcaaaaggagctcagcattcgtttgtaaaaggattggctaaggagctggcgccaagcggaatcagggtaaacgcagtagcgccgggcgcagttgatacaaatatgatgaatcaatttaccccggctgaaaaagaagagatcgctgatgagattccgatcggccggctggcccggccgcaagaaattgcggatgcaacagcttttctcctgtctgaaaaagcgtcatatatcaccggccaaattctgtcggtgaatggcggctggcactgctgatccgaaaatattcggtgtatagtttcttttgcgaaggacacaataatcttgtaacttcacatgaaatggaggaaacaagcatgtcagtattagaaaactgggatagctggaaaaacttccttggcgaccgtctaaactatgcgcaagataaaggtatgagccaggatacgattacagatcttgcgacagaaatcggcagctacttggctaatgaagtggaatctaagaacgagcaggaaaaagtgctggcagatctttggagtgtagcatcaaaagatgaacagcacgccattgccaatatgatggttaagcttgttgaaaataacagcactcactaggaagagaggggatttttcctctcttttttatgttttcctcatcacagcaacattcttctttctaattagagaaaaatgctttatgataaaggaaggtaaaattttgccacaatgaagggggtatatcatttggcaaagctcgaatggtattttgaatatgaaattcaagtgaaccgccccggactgctcggggatatttcatctcttcttgggatgctttctatcaacatcgtaacgataaacggcgtcgatctttccagaaggggaatgctcctcaggtgccgccatatagatcaaattaaacgattagaatcaatcttaaaaacgatggaaacaattaaagtaacgaagcttagagaaccgaggcttcgcgaccgtcttgccgtacgccacggccgttatattcaacgggatgccgatgacaagaaaacgttccgctttgaacgggacgagcttggcttattagtcgattttatggccgaattgttcaaaaaagaaggccataaattaatcggaatcagaggtatgccgcgtgtggggaaaacggaatcgattgtagcctctagtgtgtgtgcaagcaaaaggtggctgtttgtgtcatcaaccttgctgaagcagacgataagaagccagctgattgccgatgaatacagcactgaaaatgtctttatcgttgacggaattgtgtcaacacgaagaggatcggaacgccatctccagctggtccgagaaatcatgcggctgcctgcaacaaaagtggtggagcatccggacatattcgttcaaaatacagagtatacattagatgactttgattatattattgaactgagaaatgaccctgatgaggttattacatatgaacatgccgaggaaccccaaatgtttgatcaatccgggttttcaagctttgatttttaaaattggaaggtgtttgttgtgactgaactaggaatccggctcaaagaagccagagaggaaaaagcaatgtcattggatgatctccaagcggcaacaaagattcaaaaaaggtatttaaccgccttggaggaaggaaactatgacattattccggggaagttttatgttcgggcattcatcaagcaatatgcagaagccgttgggcttgatgcggatcagctgtttgaggagcataaaaaagatatccctaatacgtatcatgacgatgtgtctgaaaagatctccggcatgaatcttcaaaaggaaatgccaaagccagcatctaaggcgctggagctgctgccaacgatacttgttattctcggcgtgattgttgtgattgccattgtgtacgcgatcattcaatttgccaatcacaaaaacagtgatgatcacaatgcggcatcagaaaaagcaattacgcaaagtgagagcaaatacgaaatccctaaagattcaacgctgaaagagaatcaaaataacagctctgaaaaagagacagacactaaaaaagaaacgaaagaaaacgaagataagaaaaaagaaaatgacagtgagaagctggagattaaagctgctggcactgaaggatcgttaacgacttatgaagtgtccggcgctgataaaatcgagctggaactgaaggcatcagacagctcgtggattcgagtgcgcgatgaaaacagcagctctttaaaagaaggaacgctgaaaaaagacgaaacctataaaaaagacataactgatcagaaacaagttgatatccgcaccggatatgcacctaatctgaaaataaaaatcaacggtaaggttctttcatatgaacttgatccgaaaaaagtgatggcacaaaccataaagattgtaaataaaaaggaagaaaagtcatcttaattatcagatgacttttcttcacgtccgagtatgaaattggaggggctttatgtttaacttaccaaataaaatcacactagctagaatcgcattaatcccaatcttcatgattatcatgctggcgccgtttgactggggcaggctcgaagttggagacgaatcaatcccggtcgcacatttggcgggggccattctatttattattgcatctacaacagactgggtggacgggtattatgcccgaaaattgaatctcgtaacaaacttcgggaaatttcttgatccgcttgcggacaaactgctcgtatccgcagcgttaattatccttgttcaatttgatctcgctccagcttggatggtcattgtgattatcagcagggagtttgccgtgacaggtttaaggcttgttttggccggaacaggagaagtcgtagctgctaacatgcttggtaaaatcaaaacctgggcacagattattgcggtatccgcattgcttcttcataatcttccatttgaacttgtgtcattcccgtttgcggacttggcgctgtgggtagccgtcttctttactgtcgtttcaggctgggaatatttctctaaaaactgggaagcgttaaaaacatctaactaagaaagaaggacttcgtcatggaatttccaaaaaaagcagaaataattgcagtcggttcagagctgctgcttggccaaatcgccaatacaaatgctcaatttatcagcaaacagctcgctgaaatcggggtcaacgtattttatcatacagcggtcggagataacccggagcggctgaagcaggtcatccgcattgctgaagaacgctctgacttcattattttttcaggagggcttggacccacaaaagatgatctgacgaaagaaacgattgcaaatacgctgggacgtccgcttgtgttaaatgatgaggcattccaatccattgaggactatttcaaacgaacaaaacgcacgatgtcacctaataaccgaaaacaggcgcttgtgatcgaaggctctgacgtgctggcgaatcactttggaatggccccgggaatgctcacagagcatgaatcgcgctattatatgcttcttcctggaccgccgagcgaattgcgtccaatgtttgaaaacgaggcaaagcctcttctgctgaaaaagatgggttcaaatgaaaaaattgtgtcaaccgttcttcgctttttcggtatcggtgaatctcagcttgaagccgatttggaagatattattgatgcacaaaccaatccgacaattgcgcctttggcggctgatggagaggtgacgctgcgtctgacagccaaacacgccgatgaaaaggaaacagagcgtctgttaaaagaaacagaggccgttatcttagagcgtgtcggtgaatttttctatggttacgatgatacttctcttgtaaaagagctatctatagcgtgtaaggaaaaaggcataacaatttctgcggcagaaagctttaccggagggctgttttctgaatggctgacggatcatagcggtgcctcaacattatttgccgggggcgttgtttgctatacaaacgacgtgaagcagaatgtgcttggtgtcaagaaggaaacattagatcgttttggggcggtcagcaaggagtgcgcatccgaactggctaagggtgttcaaaaactcactggcagcgatatcggcattagctttactggtgtagcaggacctgatgctcaagaagggcatgagcctgggcatgtgtttatcggcatttccgcaaacggtaaagaagaggttcacgagtttcactttgcgggctccagaacggggatcagaaaacgcggcgctaaatacggctgccatttaatcttaaagcttttagagcaaaaataatattttcagcacattatcctcctaagaaaacatgatttctctgatacattatgatattttgataggaatcacgccaagaaaaaatccgaatatgcgttcgcttttttcttggcaaatcccttcaaacagggtatagtatatgtagtggtaacataaaggaggaaaaaatagaatgagtgatcgtcaggcagccttagatatggctcttaaacaaatagaaaaacagttcggcaaaggttccattatgaaactgggagaaaagacagatacaagaatttctactgtcccaagcggctccctcgctcttgatacagcactgggaattggcggatatcctcgcggacggattattgaagtatacggtcctgaaagctcaggtaaaacaactgtggcgcttcatgcgattgctgaagttcagcagcagggcggacaagccgcgtttatcgatgcggagcatgcgttagatccggtatacgcgcaaaagctcggtgttaacatcgaagagcttttactgtctcagcctgacacaggcgagcaggcgcttgaaattgcggaagcattggttcgaagcggggcagttgacattgtcgttgtcgactctgtagccgctctcgttccgaaagcggaaattgaaggcgacatgggagattcgcatgtcggtttacaagcacgcttaatgtctcaagcgcttcgtaagctttcaggggccattaacaaatcgaagacaatcgcgattttcattaaccaaattcgtgaaaaagtcggtgttatgttcgggaacccggaaacaacacctggcggccgtgcgttgaaattctattcttccgtgcgtcttgaagtgcgccgtgctgaacagctgaaacaaggcaacgacgtaatggggaacaaaacgaaaatcaaagtcgtgaaaaacaaggtggctccgccgttccgtacagccgaggttgacattatgtacggagaaggcatttcaaaagaaggcgaaatcattgatctaggaactgaacttgatatcgtgcaaaaaagcggttcatggtactcttatgaagaagagcgtcttggccaaggccgtgaaaatgcaaaacaattcctgaaagaaaataaagatatcatgctgatgatccaggagcaaattcgcgaacattacggcttggataataacggagtagtgcagcagcaagctgaagagacacaagaagaactcgaatttgaagaataaaaataaaataagtttcaaatgatacaaaaggctgagtgaaaaactcagcttttttgtattttgcaaaaaaatgataaaaatattgctttttttgacaacttttttagggctttattcgtctaacaaaacgtgtgcaaaatggaatttattttgggaggaaaaaatgaatgacaagcccaacccgcagaagaactgcgaaacgcagacggagaaaactaaataaaagaggaaaactgttgcttggtcttttagcagtgatggtttgcattacgatttggaatgctcttcatcgaaatagtgaagaaaacgaaccatctcaagaaactgcagcggtttcaaataccgatcagaaaaaagaggtcaaaaagaaaactgccgaaaaatcagaggaacaaatcaaaacagtggatcgaaaccaaaaaatcagcaattatttaaaagagatcggtttcagcggaacagccatgattgtcagaaatggagaaatcgtaacaaataaaggttttggctatgctgaccgtaaacactacattcaaaataatccattgacatctttttatgtcggttcatcacaaaaagcgctaattgcaactgctattttgcagcttgaggaaaaggggaaacttcagacaagtgatccggtaagtacgtatttacctcattttcctaacggacaaacgattactttgaagaatctgcttacacatacatcggggataaacggacatattgaaggaaacggcgccattactccggacgatttaataaaagatatagaacttcagggaatcaaacgtcagccgggcgtatgggactacaaggattccaactattctgttcttgcttatattattgctgaagtaagcggtgagccctatgaacagtacataaagaatcatatttttaaacctgcgggaatgacgcatgcaggcttttacaaaacatatgaaaaagaaccttatcctgccgtcgggtataagatggagggcagcaaaacagttacaccgtatatacctgatttatcccagctgtatggagcgggtgatatttatatgagcgctatagatatgtacaaatttgaccaagcgctgatagacggaaaactgtattcgcaaaaaagctatgaaaagatgtttacgccagggagcagctccacatacggcatgggattttatgttgctcccggaagctattcaaaccatggtgttatgccgggcttcaatatcttgaacagctttagcaaatctgggcaaaccattgttattttgttctcaaacattcaaaataatgctaaattgggccaagtgaacaataaaatataccagcttctaaatcaagaatgattggcgatcttcttttggatgaattgcattcggcacgtgaaaagaagactggcctgcaaacgttaagatggcaagcttgacaagtatttccgacacatttacaatgaagttgtaacatttgtttttttaacatgattgttaaaccatttaaacttgacaagggcgatgaacacactcattccctgtgaaggttctgtatgttgagaaaactagacaatgtacatgccgacactttttaagcaacaaccaagttcatagcaagaggaggtgaaagtatgaccccaattatgatggttctcatctccattttgctgattctactcggtttagttgttggctactttgttcgtaaaaccattgccgaagcgaaaattgcgggcgcacgcggtgcagccgagcaaattcttgaagatgcgaagcgtgatgctgaagcactgaaaaaagaagctctgcttgaagcaaaggatgaaatccacaaacttcgaatagatgctgaacaggaagttcgtgaaagacgaaatgagcttcaaaaacaagaaaaccgtttactccaaaaggaggaaaaccttgatcgcaaacatgagggaattgataaacgggaagcgatgttggagaagaaagatcattctctgaatgaacgacaacaacatattgaagagatggaaagcaaagtggatgagatgattcgtatgcagcagtctgagttggaacgaatttcgagtctaactcgtgacgaagcgaaacaaatcattcttgagcgggttgaaaacgagctttcacatgacatcgccatcatgacaaaagaaactgaaaaccgtgcgaaagaagaggcggataagaaagcgaaaaacattctttcactcgccttacagcgctgcgcagcggaccacgttgccgaaacaacggtatcagttgtcaatcttccaaatgatgagatgaaaggacgtatcatcggacgggaagggcgtaacattcgtacgcttgaaacgctgacaggaattgacctgattattgatgatacgcctgaagctgtcattctttccggatttgatccgatcagacgtgagacagccagaattgctcttgataaactcgttcaggatggccgtattcatccggcacggattgaagaaatggttgaaaaatctcgccgcgaggtcgatgactatattcgtgagatgggtgagcaaacgacatttgaggttggcgttcatggcctccacccagatctcatcaagatcctcggccgcttaaagttccgtacaagctacggtcaaaatgtgcttaagcattccatggaagtcgcattcttggccggtctaatggcatcggagcttggtgaagacgcaaagcttgctaaacgtgcgggtcttcttcacgacatcgggaaagcaattgaccatgaagtagaaggaagccacgttgagatcggggtagagcttgcgaccaaatataaagagcacccagtcgtgattaacagtattgcatcacaccacggggacgaggagccgacttccattattgctgtactggtagctgcagcagatgcgctttccgctgcaagacctggcgcaagaagtgagacgctcgagaattatattcgaagacttgaaaaactcgaagaaatttctgagtcctacgaaggtgttgaaaaatcatttgccattcaggctggacgcgaagtgcgaattatggtgaagccggattcaattaatgatcttgaggctcatcgactggcgcgagatatccgcaagcgaattgaggacgagctcgattatccaggtcatattaaggtgacagtaatcagagagactcgagccgtagagtatgcaaaataaagtgatgcgctaagcatcactttatttttttgacggcaaggaattttcaagaagaaaggatttacaaaatgagaattttatttatcggagatgttgtcggttcaccgggccgtgacatggtcaaagaatatgtaccaaagctaaaaacaaaatataagcctcactttaccattattaatggtgaaaacgccgcacatggaaaaggcctgacggaaaaaatttatcacagcttaatccagtccggggcagatgcaatcacaatggggaaccacacatgggacaaaaaagaaatatttgattttatagatgacgttccgaacttggttcgcccggcaaactttcctgaaggaacaccggggaaagggatcacatatgtgaaagcaaacggcaaagaactagcagtcattaatttgcagggacgtacgtttttgccgccgcttgatgacccgtttttaaaagcggatgaattgatcgcagaagccgcgaaaagaacaccgtacatttttattgactttcatgccgaagcgacaagtgaaaagctcgcacttggctggtacacggatggacgggcatcggctgtagtaggaactcatacacacgtgcaaacagcggataaccgcattttgccgaagggaacggcatatattactgatgtgggaatgactggcccgtatgacggtatactggggatggacagagagacgattattaagcgattcaaaacgaaccttccagtccggtttactgtcgctgaaggaaaaacaacgctcagcggagttgtcattgacattgacgatcaaacgaaaaaagccgtgaaaattgagcgtattttaatcaacgatgatcacatgttctttgaatagttgaacatatggttattttataaaaatattaaaaagaaaagcaggaatatagcaactccttagtgaatatagtaaaaatggaaggtagcccgctatttttgaaaagcattgtggggatggctttttggatagcaacatctaataatgattgttctaatgaacactcacttatccattgtaaaactaagggggagcagaaatggaaatcttaaaagtttcagcaaaatcgagtccaaattcagtggcaggtgcgcttgcaggcgtgttgagagagcgaggagccgccgagattcaagcgatcggagcgggtgcattaaaccaggctgtaaaagctgtggcgattgccaggggatttgtggcgccaagcggcgttgatttgatttgtattccggcttttacagatattcaaatcgatggggaagaaagaacagcgattaaattaatcgtggagcctcgctaaaaacaaataaagcattctcaacctgtttgcgtaatgcaaacaggttgtttttcatttattgtgatattttctcccgatagtatttttagcacataaatgagcgaatatacaaaatcagaaatgagctaaaacgtttcaaaaaaaatttccgcccatttttcaagacagatacttttgtccttctggaaaagacagtgctgtttacgcttattccatatcatggtacaatccgaatataacaagaatttttcaaggaggattgtacatgcagagtggaaagatgaaagctctaatgaaaaaggacggggcgttcggtgctgtgctgactgaagttcccattcctgagattgataaacatgaagtcctcataaaagtgaaagccgcttccatatgcggcacggatgtccacatttataattgggatcaatgggcacgtcagagaatcaaaacaccctatgttttcggccatgagttcagcggcatcgtagaggacgtgggagagaatgtcagcagtgtaaaagtgggagagtatgtgtctgcggaaacacacattgtttgtggtgaatgtgtcccttgcctaacaggaaaatctcatgtgtgtaccaatactgctataatcggagtggacacggcaggctgttttgcggagtatgtaaaagttccagctgataacatttggagaaatcccgctgatatggacccgtcaattgcttccattcaagagcctttaggaaatgcagttcataccgtacttgagagccagcctgcaggaggaacgactgcagtcattggatgcgggccgattggtcttatggctgttgcggttgcaaaagcagcaggagcttctcaggtgatagcgattgataagaatgaatacaggctgaggcttgcaaaacaaatgggagcgacttgtactgtttctattgaaaaagaagacccgctcaaaattgtaagcgctttaacgagtggggaaggagcagatcttgtttgtgagatgtcgggccatccctcagcgattgcccaaggtcttgcgatggctgcgaatggcggaagatttcatattctcagcttgccggaacatccggtgacaattgatttgacgaataaagtggtatttaaagggcttaccatccaaggagtcacaggaagaaaaatgttttcaacatggcgccaagtgtctcagttgatcagttcaaacgtgatcgatcttgcacctgttattacccatcagtttccgttagaggagtttgaaaaaggtttcgaactgatgagaagcgggcagtgcggaaaagtaattttaattccataaagggggataaacatgacgaaggaatttgagtttttaaaagcagagcttgatagtatgaaagaaaaccatacatggcaagacataaaacagcttgaatctatgcagggcccatctgtcacagtgaatcaccaaaaagtcattcagctatcttctaataattacctcggattcacttcacatcctagactcatcaacgccgcacaggaggccgttcagcagtatggagccggcaccggatcagtgagaacgattgccggtacatttacaatgcatcaagagcttgagaaaaagttggcagcctttaaaaaaacggaggcggcacttgtattccaatcaggcttcacaacaaaccaaggcgtactttcaagtattctatcaaaagaggacattgtcatctcagatgaattgaaccatgcctctattattgacggaattcgactgacaaaggcggataaaaaggtgtatcagcacgtcaatatgagtgatttagagcgggtgctgagaaagtcaatgaattatcggatgcgtctgattgtgacagacggcgtattttccatggatggcaacatagctcctctgcctgatattgtagagctcgctgagaaatatgacgcatttgtgatggtggatgacgcccatgcatccggagtacttggcgaaaacggcaggggaacggtgaatcacttcggtcttgacggcagagtgcatattcaggtcggaacattaagcaaggcaatcggagtgctcggcggctacgctgcaggttcaaaggtgctgatcgattatttgcgccataaaggccgtccatttttattcagcacatctcatccgccggcagtcactgcagcttgtatggaagcgattgatgtcttgcttgaagagccggagcatatggagcgcttgtgggagaatactgcctattttaaagcaatgcttgtgaaaatgggtctgactctcacgaagagtgaaacgccgattcttcctattttaattggtgatgaaggtgtggcaaagcaattttcagatcagctcctttctcgcggtgtttttgcccaaagtatcgttttcccgactgtagcaaagggaaaagccagaattcgcacgattataacagcagagcacaccaaggatgaactggatcaggcgcttgatgtcatcgaaaagacggcaaaggagctccagctattgtaacaagaggaagagtttactcttcctcttttgattccttattgattattattctcaatgagtgtacaatgataggttgccagttgtgcagagcttcaataacctttatactgaagggtggaagtttggtttgaaaggagaaaatatgacatgaatgaaaaacaaaaattagagagcggacaagttaatccatcggacaaaaaatccgagaaggattacagcaagtactttgaagctgtttacattccgccttctttaaaagacgcgaaaaaacgaggcaaggaagccgttacttatcataatgactttaaaatttctgaacaatttaaaggattgggagacggaagaaagttctatatccgtacgtacggctgccaaatgaatgaacacgatacagaggttatggcagggatctttagggcgctcggttacgaagcgacaaactctgttgacgatgccaatgtcattttgttaaatacatgtgcaatccgtgaaaatgctgaaaacaaggtgtttggtgagctcgggcacttaaaagcactgaaaaaaaacaatcccgatctgattttaggcgtgtgcggctgtatgtcccaagaggaatcagtcgtgaaccgtattttgaaaaaacatccgtttgtcgatatgattttcggaacgcataacattcatcgcctgccggagcttttgtcagaagcatacctttcaaaagaaatggttgtagaagtttggtctaaggaaggggacgttattgaaaaccttccgaaagtccgaaatggaaaaattaagggctgggtcaatatcatgtacggctgtgacaaattctgtacgtattgcattgtgccttacacacgcggaaaagaaagaagccgccgccctgaggatatcattcaggaagtgagaaggctcgcaagtgaaggctataaggaaattactctgttaggccaaaacgtaaacgcgtatggaaaagactttgaagatatgacgtacggacttggtgatttgatggatgaactgagaaaaatcgatatcccgagaatccgttttacaacgagtcatccgcgcgactttgacgaccgcctcattgaagtgctggcaaaaggcggaaatctgcttgatcacattcatcttccggttcaatcaggaagctcagaagttctcaagctgatggcccgcaaatatgacagagagcgttacatggagctggtgcgaaaaattaaagaagcaatgccaaacgcttctttgacaacggacattatcgtcggatttccaaatgaaacggacgaacagtttgaagaaacgctttctctataccgtgaagtggagtttgacagcgcctatacgttcatttactctccgcgtgaaggcactccggctgctaagatgaaagataatgtaccgatgcgtgtgaaaaaagaacgcctgcagcgtctaaacgcactggtgaatgaaatttctgctaaaaaaatgaaggaatacgaaggcaaggttgtcgaagtattagttgaaggtgaaagcaaaaataaccctgatattcttgcgggctatactgaaaaaagcaagcttgttaatttcaaagggccgaaggaagccatcggcaaaatcgtccgcgtgaaaatccagcaagcgaaaacatggtcgcttgacggagaaatggtaggagaagcaatcgaggtgaaataagatgacgctctactcaaaaaaagacattgtgcagcaggcacgaaaccttgcaaaaatgatctctgaaacagaagaggttgattttttcaaacgggctgaagcgcaaatcaatgagaatgacaaagtgtccacaatcgttaatcagattaaagccctgcaaaagcaggctgtcaatctgaagcattatgaaaagcatgaagcgctcaaacaagtagaagcaaaaattgacgcgctgcaagaagagcttgaagagattcctgttatccaggaattcagagactcgcaaatggaagtaaatgacctactgcagctcgttgcacacaccatttccaaccaagtcacaaatgaaatcatcacatcaaccggaggcgacctgctgaaaggggaaaccggttcaaaggtgaagcattcaaataacagctgttctctctaaacacggtgcctttacaggcccgtgtttttttatgtgtgggttatgaactaaataatctatgtaccaaatgttcaattggtttttctgtgcgcagccgcgtgtaaactttatcgcacttataagtaaagtttctaggctcacctgcatacaatggaacagaaactttgtatttttatattttatttataaaaatgcacactagacaaatgcccagcataagataacacgaagaagaacaaggaggcatgccggaatgtctgaatacagggaaattattacgaaggcagtagtagcgaaaggccgaaaattcacccaatgcaccaacaccatctcgcctgagaaaaaaccgagcagcattttgggtggttggattattaaccacaagtatgacgctgaaaaaattggaaaaacggtagaaattgaagggtattatgatataaacgtatggtactcttacgcggacaacacaaagacagaggttgtcacagaacgggtaaaatatgtagatgtcattaaactcagatacagagacaataattacttagatgatgagcatgaagtgattgccaaagtgcttcagcagccaaactgccttgaagtgaccatttcgccgaatggaaataaaatcgttgtgcaggcagaaagagaatttttggcggaagtggtaggggaaacaaaggtagttgttgaggtcaatcctgactgggaagaggatgacgaggaagattgggaagatgagcttgatgaagagcttgaagacatcaacccggagtttttagtgggagatcctgaagaataaaaaagggactaggggagacagtacccccaagtctcttttttatattgatatatcattcttttatcactttttgtttatgttataatgaaggttggaaaatagaaacgttgatacatagtgagggattaaacaatggccggttatacgcctatgatacagcaatatttaaaaataaaggcagagcaccaggatgcctttttattttttcgcctgggtgatttttatgaaatgttttttgaggacgccaaaaaagcgtcacaagagctggaaattacgttaacgagcagagatggcggtgcggctgaaaaaataccgatgtgcggtgtgccgtatcattctgcttccgcgtatatcgaacagcttattaaaaaaggatacaaagtggcgatctgtgaacagacggaagatccgaaagccgcaaagggcgttgtgaaaagagaagtggttcagctgattacgcccggaactgtaatggacggcaaaggcatccatgaatcggaaaataattttatcgcatctgtttcagcctgctcgaacggatacggacttgcgctgtctgatttaacaacgggagaaaatttggctgttttgattgaacggcttgaagacgtcatatcagaaatttattcagtcggcgcacgggaaatcgtggtttcaggaagcttggatgccgatacagtggcacagctgagagagcggtgcggtgcaacgatctcaattgaagatggagaaacagacgaacacgtaacgatcattgagcacttaaataatgaagatataacaaaaacatttatgcgcttatatacgtatttgaaaagaacccaaaagcgcagccttgatcatcttcagcccgtgcaggtgtatgagcttgaggaagcgatgaaaattgacttgtactcaaagcgtaatctggagctgaccgaaacgattcgttcgaaaaataaaaaaggctcccttttgtggctgctggatgaaacaaaaacggcaatgggaggccggctgcttaaacagtggattgaccggccgcttatcagagtcaatcaaatcgaagagcgccaagaaatggtggaaacattaatgtcccatttctttgaacgggaagatctgcgtgaacgtttaaaagaagtatatgacttagaacgccttgccggacgcgttgcattcggaaatgtcaatgcccgggatttgattcagctgaaggaatcgttaaagcaagttcctggcatcaaacagctggttgcttcactggctcatgacaaggccaaggaacgtgcagagcgcattgacccttgcggggatgtacttgaactgctggaagaagcgctgtacgaaaaccctcctttatcggtaaaagaagggaatctgattaaagatggttataatcaaaagcttgatgaatatcgtgatgcaagcagaaacggaaaagactggattgcccgcctggaacagcaggagcgggaatacacaggcattcgttctttaaaggttggctttaataaagttttcggttattacattgaagtgacaaaagcaaatttgcacttgcttgaggaagggcgttatgagcggaagcagacgttaaccaatgcagagcgctacattacacctgaattaaaagaaaaagaagcgctcattttagaggcggaaaataacatctgtgaactggagtacgagctgtttaccgagctgcgcgagaaggtgaagcagtatattccgcggctgcagcagcttgcaaaacagatgagcgagctggacgcactgcaatgctttgcgacaatcagtgaaaatcgtcactacacgaaaccggagttctctaaagatgaagtcgaagtgattgaaggcagacacccggttgttgaaaaagtcatggacagccaggaatatgtcccgaacaactgtatgatgggcgataacagacaaatgcttctcattacaggtccaaacatgtcagggaaaagcacgtatatgagacaaatcgcgctcatttccattatggcgcaaatcggctgctttgtacccgcgaaaaaagcggtgcttccgattttcgatcaaatttttacgcgaatcggcgctgcagatgatttgatttccggacaaagtacatttatggtagaaatgcttgaagcgaaaaatgcgattgtcaacgcgacgaaaaacagcctcattctgtttgatgaaatcgggcggggaacgtccacttatgacggcatggcgctggcacaggcgattattgaatatgttcacgatcatatcggcgccaagacgctgttcagcacacactatcacgagctgaccgttcttgaggacaagctgccccagctgaaaaacgttcatgttcgcgctgaagaatataacggaacggttgtctttcttcatcaaattaaagaaggtgccgctgataaaagctatggtatccatgtagctcagcttgccgaactgccgggagatctgattgctcgcgctcaagatattttaaaagagcttgagcattcaggaaacaaaccggaagtgccggtgcagaaacctcaggtgaaagaagagccggcacagctgtccttttttgacgaagcggaaaagccggctgaaacaccaaagctttcaaaaaaagaaaagcaagtgatcgatgccttcaaatcacttaatatactggatatgacaccgcttgaagcgatgaatgaaatgtacaagctgcaaaagaaattacattaaaacggggtgatgaatgtggcaaaagtcatccagctgtcagatgagctttcgaataaaatagcggcgggcgaggttgtggaacggcccgcctcagtcgtcaaagaattggtggaaaatgcgatcgacgctgacagcacagtcattgaaatcgatattgaggaagcaggccttgcatccattcgggtcttggataacggcgaaggaatggagaatgaagattgtaagcgtgctttccgccgccacgcaacgagtaaaataaaagatgaaaatgatttattcagggtgagaacgctcggtttcaggggagaagccctgccgagtatcgcgtcagtctctcatctggagattacaacaagcactggtgaaggagctgggacgaagctcgtcctccaaggaggaaacatcatttccgaatcgcgttcctcaagcaggaagggaactgaaattgtcgtttccaacctgttttttaacacaccggcccgtttgaaatatatgaaaaccgttcatacagagcttggaaacattacagatgtggttaaccgtattgctctggcgcatccagaggtatcgatccgcctgcgccatcatgggaaaaacctgcttcaaacgaacggaaacggagatgtgcgccatgtactggcagcgatttacggcacggctgtcgccaaaaaaatgcttccgctgcatgtgagctccttggattttgaagtaaagggatatatcgccctcccagagattacacgggcgtcgagaaactatatgtcgtctgtggtcaatggccgttacattaaaaatttcccgctcgtcaaagcggttcatgaaggctatcatacgcttctgccgatcggacgccatccgattacttttatagaaattacgatggacccgattttagtcgatgtcaacgtgcatccatcgaagcttgaggtccggctcagcaaggaaacagagcttcatgacttaatacgtgacggaattaaagatgtgtttaaacagcagcagctgattcctagtgcccaggtcccgaaaaaatcagcacctgccatcaaaaatgagcagcagtttataacctttgatgaaaagcctccggaaaaaaaagttccggaaaaatcgactgcgccatcttattcaccgatgaagctcagctcagtcgtaaaagagccggttgatgcggaggaaaaattgccccctctccaatttgatgctcctcctatcgttgatcaggaacaaacccttgaggtgtccgatgtttcagcagaacagcctgaaacatttgagcaggaatgccatgaggaacagccgcagccagcgtctgatcgggttccaattatgtacccgattggccagatgcacgggacttatatattggcacaaaacgaaaacggcctatatattatcgaccagcacgccgcccaagaacgtattaaatatgagtacttccgtgaaaaggtgggggaggttgagcctgaggtgcaggagatgattgtaccgctgacgttccactactccacaaatgaggctttgattattgaacagcacaaacaagagctcgaaagcgtcggtgtctttttagagtcattcggctctaacagttacatcgtccgctgccacccagcctggtttccaaagggagaagaagcagagcttatagaagaaatcattcagcaggtgctcgactccaaaaatatagatattaaaaaactccgcgaggaagcggcgattatgatgagctgcaaaggctccatcaaagcaaatcgccacctcagaaacgacgaaatcaaagcgcttctggacgacctccgaagcacatcagacccatttacatgcccgcacggccgcccgatcatcattcaccactcgacatatgagatggaaaagatgttcaaacgcgtgatgtagcgggggtggtaggcattgatccattctctgaatggatcaatgctttttttgtactccttcgagtgtcagattataagaaacggttgtaaacgtgtgagcagtgttaaagcattatacttcatggtccctccgtataacgaaatttccatttacaggcaattagaattaatgtatattttgggtgagggggtggaaacacatggcatgtggtccgaagatcattatctttttggatgaacttgatgatccgaatgtaagaatcattttagaatgcagaatttaaattacaacattgtgttttgctccctgttcgtgtgaacagggagttttttcgtttatataactggtgatgtccaaatataaggtgttatgaattctccatatctgccatcggcattttaagctgcttctctattaggctggtcatcaaaagcaagttcagtgaaagccatcactgctgatatcacaacaagcaagatatctggaatataaatagactgcataaagtaatctgcaaaacagatcgttataagattgctgataaaatacagtataaaagcaaaaagtgcagtctttttcaatgaaagtgattttgccaaaatgatagagataatctttgtgagtgggtctatgattaaacctacagcaaagcaggctaaaataaataaagctaatgtttgattggaagcgtatgtgatgcccagtatggagaataagcctttcatcccgaagaaaaagccgccgaagatgactgcaagcgcaatggccgcgataaaagtgatagatacaattccgattaattttgatctgaggttaaaatctttagagtgctcgttctgttctttatggttcaagtatgacactcccttcacctgcttactcatacaaacagcacccttgaatcagcccaaaatatctataagtctgttttctgacgaaaatagtatagcatattttaacaaaaccaaaaaaggccctttccactggggaagggcctttttcatcatgttaactcctgagattcgccgaagctttctctttttttggccaaataaaatagctggctgtaatgagaaagtcaattcctataatgacagtccacagtttaagaatgccgctcaacgcctcggttcgggaagagtcattgataaaatagatcatccctgccaatagtcccgcaccaattaagtaggccagcacatgtcttagccagcctttcgcaccgtgtttggcatgatccattccaaaacgtttcagcggttttgcgcctttttttgtcacataatattgaaatttttcatctgcccattgaatcatttgtttcccataagcgatcgatataccgatgtaaacagctgcaatcccatgggctgcggtcgctgaggctccgcggtaaaggtccacaccagttgccgctaacaagatcaaatcgataactggagttaaggcaaggaatagcagtcctaatgtatgtcgtttgaatacgtagcgtacagcaagccccaaaacaatgacaacccaaaacgcaatttcacagaaaacaatcatccatgcgataccgttcaatccattcccctcttttcaatacagttgtattatttaaataatatgttaccatctttgtttttgtaacacaactgtattataaaaattgccctctcatttttttcttgttacaataaagctatgccaaaacaaattgaccatgagaaaagaagaaaacaaattgcagaagcaacgtggcgcgtcattttagaacgagggatggagggagcatcagccagaaatattgcaaaggaagcaggattgtcattaggtgcgctgcgccattatttctctacacaggatgaattgcttgcttttgcaatgaaacttgtccaagaaaaggtgacggaccgaattaaggacattgcagtgagggatttgctccctaaggaaaaagtgttgcaaattttgcttgaaatggtcccgacgaatgaagaaacgattagagagatggaggtttggtttgcttttactgcttacgccagacataaaaaggatatgtttgatgcgaatcatgacgggattttcagcggcatgcggaatctgattgcctatttagatgaatccgatttactgaagccgaatgctgataaagacattgaagctgagagactttacgcgcttgttgacggcttggctttacatgccatgcttgaccctgtgcgagtgaataaagaccgaatcaagcgggtcattatgcagcatgtagagtcaatttgcgtggaagatacacgtgagacacaaaaacgtcatccttaaggcactagtgcgaaaagcgattcttgttgggcatgcgtccaaaagagtcgcttttttatattcaaagaacaaggatctctgaaaaaaatggaaaacgatcatgctgtttggtaaagtggaatgaaagacggactgaggagtgaacactggtccatcgtttaagaactttacatgatagggatggtataaatgaatcttacttacaaagtgcatccaattaaaacaaggtatcagggctggacgaattattgctatatcattgaagatattgtaagcagatctgcaattgttgttgatccctcatgggaattgagtaagataaccactacactttctgaactcgaagcggaattaaaggcagtcgcattgacacactctcattatgatcatgtaaatctggtagacccgctgacgaagatgtttaacgctcaagtttatatgtcaaaaaaagaaattgattattatcaattccgatgcagaaatttaattagcctagatgatcatcagacaatcagcataggaaacacaagagcacaatgtcttctcacaccggggcatacagccggcggaatgtgttatttgttttctgagagtatttttaccggagatacggtgtttacagaagggtgcggcatatgtgaggatgatggcagctctgcggaagagatgtttgatagtattcaaagaataaagtcggaggtttcacctcatgtacgggtgtatcctggtcactcatttggcaaatcgcccggtcattcgataaaggatctttatcagcataatatttactttcaaattgataaaaaagaatattttgtgaaatttcgcactcgtaaaaaccaaaaaggtatttttgattttaaataatccttctgaatctattatcctatttttcttcgaatatctaaatgatttttattttcaaaaatgattacatagaaggtgttatttattttgaaaactcatttgaaagaaaatgaagcgcattatcatgatatggcgccctatacgtgatctgggtcttttttcttatgttctgttatatctcctgatcctttattcctcaatggaaaaaagcagaaaaacaatcgagcaaactgtaggaaaaattaacttgacggataatatttacagaggttaccatcaacatgaacatgctactatttatccggtcatcactattataaaatcatacagaagtgaaatacatctactaatcggaagggtggctttgagagaatgatcacatatgtttttccaggtcagggttcacaaaaacagggaatgggcagcggcctattcgatgaatttaaagaactgacggatcaggcagatgagatcttaggatattctatcaaacgtctttgcctggaaaatccttattccaatttaaacaaaacgcaatttactcagccggcattatatgtggtaaacgcactaagctatctgaaaaaaatcaaggatgaagaagttaaacctgactttgtcgccgggcacagcttgggtgaatacaatgcgttatttgcagctgaagcctttgattttgagacaggtttacagcttgtcagaaaaagaggcgagctgatgagtctgataagcaacggcggtatggcagctgttatgggactaaatgaagagcaggttgcaaaggctctgaaagaatatcatttacatgatgttgatatcgctaatgtgaatgccccatatcaaattgtaatttcaggaaaaaaagatgagattgaaaaagccgcatctctttttgaaacgatgactgaagttacaatggtactccccttaaacgtaagcggcgcgtttcattccagatacatgaataaggcaaaagaagaatttgaggagttccttcatgccttttatttttcgcctccgtctatcccagttatttctaatgtgtatgccaaaccgtatacatacgaattcatgaaacagacgctggctgatcaaattaatcattcagtgaaatggactgacagtataagctacttaatgaaaaaaggccatatggagtttgaggaggtagggcctggaaatgttttaactgggttaattcatcgcataaagaaagatgcggaagcaatgcccagctaaagcatttgcccctatggccgtgcacctcatcaatcaggtctaaacacagatttcctttcatttaaggtataaagttttaaagattcaatcgttcgattgacactgtttctaattgaataactttatatactgttacataaagaggctgataaattaagttagacatttgaactatgtcagccggtctgtcaaaccatcgctcccacatctagatggtccattttttaaccgcacccaccaatcatagagtcgatgttctttgctgatcctgttatcatgttacatcaattttgagatatcaacatacatctacgatcacgtcataaatgaaccgcatccagagcaccaatagcaatccttccaagttgaatctcctttactttttcacatatgtcttttccgtttattaatttcatttcaatcgctgctatgtgctttaacaacatgcatggaaatgagaaatccaatagccgtcataaatataaaaaaagaaggttatacacatgaatgaaccgcttgtttttatgttttccgggcaaggttcccaatactatcacatggggaaagaactatttaaggaaaataccgtgtttcgtcaatcaatgcttgaaatggatgccattgcagcacggcgaatcggcacatccattgttgaagaaatctaccatccaggtaaacgtgtgtcagatccgtttgacagtattcttttttcccaccccgccatttttatgattgagtattccttatataaggttttggaagacaggggaatttatcctgattacgtattgggatcaagtctgggagaattcgcagcagcggcagtttctggtgtgtcagacgcagaggatatactggattgcatacttgaacaggctattatcatccaaaattcctgcgataaaggaaaaatgatggccattctggacaaaccgcaattgctgaatgattatccgcaactgtttggaaatagtgaactcatttctatcaattatgattcgcacttcgtcatttctggtgaagaagatcatataaggaagattatggaggatttaaaggagaagcagattctttgccagctgcttcctgtgtcctatgcctttcattcttcgcttattgatccggcagagagtgcctatgcagaatttttaagatcaaaatcttttcaaaaaccgtcaataccgattgtatcgagcttaacgggaagctgccttcacgtaatggacgagaatttcttttggaatgcggtcagaaagccaatgatgtttcgtgaagcgattcgatatttggaaagccagcatacatgcaagtttatcgatttagggccatccggcaccttagctgcttttgtgaaacagctgattccgggtgatgcagctgaccgttgctgctcaatcataacaccatttcatcaggagctgaaaaatctgaatacggttgagtattaccgtacaccagaaaggaagtttacaagatgattacatatgtctttccagggcaaggctcccagcaaaaggggatgggacaagggctatttgaacagtatcagcatttgacagatcaagcagatcaaatattgggctattcaatagagaagctatgtaccgaaaaatcatatctggatgtaaatcatactgaatacacgcagccggctttgtatgttgttaatgcactcaattacttgaagagagtggaggagaccggcagaaaacctgattttgcggcaggacatagcttaggagaatacaatgcgctgatggcagccggtgcctttgattttgaaaccggattaaggctcgtcaaaaaaagaggagaattgatgggacgaattacagggggcggaatggctgctgtgatcggcctgagtaaggaacaagttacagccgttttagaagagcaccgtcttcatgacattgatgtggcaaatgaaaatacgccccggcaaattgtgatttctggcccgaaaaaagagattgaaaaagctcgggctgtttttgaaagcaccaaggatgtaaagctgtttcatccattaaatgtgagcggagcttttcattccagatatatgaatgaagccaaacaggtatttaagcaatatattgactcattccagtttgcacctttggcgatcccggttatctccaatgtctacgcagagccataccatcaagacagattaaaagatacattatctgaacagatggacaacacagtgaaatggacggacagcattcgtttcctgatgggaagaggagaaatggagtttgaagagattgggcctggaactgttttaaccggtctcattcatcggattaaaaatgaagctgaaccattgacatatataccgaaaaagaaccccgcgatcagtgcgcatctaaaggagaaacgcaatgttcaagctgggattacggcagaatctttaggaagtgctgaatttaaacaagattatcatcttacatatgcttatcttgcaggaggaatgtaccgcggcattgcttcgaaagaaatggtagtaaagctgtcaagagcgggaatgatggggttctttggcacaggaggtctgagcctgaaagaggttgaagatgcgatccatgctatacaaggtgaattagggaaaggacaagcctatggcatcaatctggtccacaatatgaaacatactgaatcagaagaaaaaatgatcgatcttttattgaggaatcaagtgagcattgtggaggcttcagcatttctaagtgtcactcctgcattagtaaggtaccgcgcaaaaggagtgaaacgaaatcaaaatggtgacgttatatgctcaaatcgtctcatagcaaaaatatcacggccggaagttgcagaatcatttctgagtcctgcgcctgagaatatgctgcaaaagcttttaggagaaaataaaatcactatgaacgaagctgagttgttgcggtgcattccgatggctgacgatatttgtgtagaagctgattcaggcggtcatacagatggcggtgtggcatacagcctgatgccggcgatgacatctttaagagatgaaataatgaaaaaatatcaatttcggaaaaaaataagagttggtgcagctggagggattggaacacctgaggcagcgatggcggcttttatgctaggggctgattttattctaacaggctcaatcaatcaatgtacggttgaggcggcaacaagtgataaagtaaaggatttgcttcagcagatgaatgtacaagatacagcctatgcgcctgcaggtgatatgtttgaatcgggcagtaaagtgcaggtgctaaagaaaggcgtgttctttcccgcacgggcaaacaagttatatgaactgtaccagcggtatgggtctatacgtgagctggatgcaaagatgctggcccagcttgaggagaaatactttaaacgcagtatagaagacatatataaagatattgcattgcattatcccgcggcagacattgagaaggctgaacaaaacccgaagcataaaatggctttgattttccgatggtacttcagatacagctcaaaattggcaatcagcggaagcgaacattcgaaggtcgattatcaaattcactgcggtcccgcgctgggagcctttaatcaatgggttaaaggatcgcaattagaaaattggcgaaaccgccatgtggatgaaattgggaaaaaaataatgacagaaacggcagtattgcttcatgaacggatgcaatcgatgtatcagccgtcgcatgaaacagacaacataaaaatgaaagtttgaatattatgaaaaaatacctataaaaatcattaaaataatccctcgaaggagagagcgtattatggataaacagagaatctttgaagtactaatcaccaatatttgcgaggtgcttcctgaattagacggacacagatttgagcctgaagatcagctagttgagctaggagctgactctgtagacagagctgaaattatcacgatggtgctagaggatttatcgctaaaaattcctcgcattgagctatccggggtgaaaaacatcggtgaattagctgaggtgctttatgacaaagtgcaatctgcctgaggtggtggtgaccggtgtaggcgttacggcctccatcggtcaagggaaagaggactttgcttcctcgctgctgtccggcagacatgcctttgatgtcatgaagcgttcaggcagacaaaaagacagccggtttatcggagccgaaattgcgtcattgtcttatcctgaccgactctccaaaaaaatgttgcgaaaagcatcattctccagccgcgctgcattggtaactctcacagaggcttgggaggaggctgaattggacgatgcagattcctcacgtatcgggctggttgttggcgggtcaaattttcaacagagagaaaactttgaagtttatgaaaggtatcaagaccgctccggttttatttctccggcgtatggcctgtctttcatggacagcgatctttgcgggatatgtacagatcagtttggcatcacgggattagcatatacggtgggaggagcctcggccagcggccagttagcagtcattcatgcgattcagcaagtcctgtcaggcgaagttgatacttgcattgcacttggtgctttaatggatctttcttatatggaatgcgaggcgctaagggctttaggcgctatggggacggacaaatatgctgatgaacctgaaaaagcgtgccgtcccttcgatcaaaacagagacgggtttatctatggagaatcgtgcggtgcattggtaatagaacgaaaggagacggctttacgaagaggtcttaaaccttatgcagcattgtctggctggtcaatcaaactggacggaaaccggaatcctgatccttcattagaaggagagattcatgtcatccagcaggcactggagcgtgccaggcttttaccagaagatattgattatattaatcctcatggaacaggctcttttattggagatgaaatagaattaaaggcgctccgtgcatgccggctttcccatgcttatatcaatgcaacaaaatcgataaccggacacgggcttagtgcggcgggcatcgtagagattatttctgttttgctgcaaatgaaaaaatctgccctgcatccgagcaggaatttggatcatccaatcgatgattcctttcattgggtaaatgagaaatcgatttcataccgcatcaaaaatgcgctgagtttaagcatggggtttggcggaatgaacaccgcggtttgtatacaaaacattgagaaatgtggaggcgaatcataaatggtttcagccggaatagaagcgatgaatgtctttggcggaacggcataccttgatgtcatggagctggccaaatacagacacttagatactgcgagatttgaaaacttattaatgaaagaaaaagcggtagcactgccttatgaagatcccgtgaccttcggagtcaatgcagctaagccgattattgatgctttatctgaagcagagaaggaccggattgaattgctgatcacttgctctgaatccgggatcgactttgggaaatcgttaagtacatatatccatgaatatttaggtctcaaccgcaactgccgtttgtttgaggttaaacaggcgtgttattcagggacagcgggatttcagatggcggtgaattttatattatcccaaacttctccgggtgccaaagcactggttatcgccagtgatatttcacgttttttaatcgctgagggcggagacgctttaagcgaagattggtcttatgcggaaccgagcgccggagcgggagcggtggccgttttagttggcgaaaatcccgaggtgtttcaaatagatcccggagcaaatggttattacggctatgaagtgatggacacgtgccgccccattcccgacagtgaagcgggagattctgatctgtctttaatgtcatatttggattgctgcgaacagacctttctggaatatcaaaagcgtgtaccgggtgccaattatcaggacacgtttcaatatcttgcttaccatacgccctttggcgggatggtgaaaggtgcgcaccggacaatgatgcgtaaggtggcgaaggtgaaaacatccgggattgagacggattttttaactcgggtaaaaccaggtttaaactactgtcaacgagttggaaatattatgggggcagccttgtttctggcattggccagcacgatagaccaagggagatttgatacgcctaaacgaattggctgtttttcctacggatccggctgctgttctgaattttacagcggaattacaactccgcaaggccaggagcgtcagcgaacatttggtattgagaagcatttggatcgccggtatcagctctccatggaagagtatgagctattgtttaaggggagcgggatggtgcggtttgggacgcgcaatgtaaagctggactttgagatgataccgggcatcatgcagtccactcaagagaagccgcgcttgtttttagaagaaatttctgagtttcatcggaagtacaggtggatctcgtgacctatcaaacgataaaggtccgctttcaagcgtcggtttgctatattacctttcaccgtcctgaagcgaataatacgattaatgatacgctgatagaagaatgcttgcaagtgttaaaccaatgtgaaacatcaacggtgacggttgtcgttttagaggggcttcccgaggtgttttgtttcggagcggattttcaagaaatctatcaggaaatgaaaaggggcagaaaacaggcaagctcccaagagcctctctatgatttgtggatgaaattgcagaccggcccttatgtcacgatttcgcatgtcaggggaaaagtgaatgccggcggtcttggatttgtatctgccacagatattgccattgctgatcagacggcgtcattcagtctctctgagctgctattcggcctgtaccctgcttgtgttttaccgtttctgatccgccgtatcggccggcagaaagcgcattatatgacgcttatgacaaagccgatttccgttcaggaagccagtgaatgggggttaatagatgcttttgatgctgaaagtgacgtgctgctgagaaagcatttattgcgtttgcggaggctgaataaaaaaggaatcgcacattataaacagtttgtgagctcacttgatcatcaagtcagtcgtgcgaaagccaccgctttaactgcaaatcaagacatgttttctgatcctcaaaaccaaatgggaatcatcaggtatgttgaaacaggacaattcccatgggaggatcagtaaccgtttaaaaatgacaatcagaaccgttaggaggacatcatgacgcattctgttgtagagcttatcgaaattgaatccgccattattcaggtaaagatgcaagatcgcactcataaaaacgcgttttcacaagaacttacagacggtttaattcaagcgtttgaatacatacggcagaaccccaaatacaaagcggtcattttgacaggatatgataattattttgcttcaggaggaacgcaagaaggactgcttcgaattcaacagggattgaccaagttcactgatgacaatctttattctctggcgctggattgtgagattccagttattgcggcaatgcagggccatggaattggaggcggctttgtcatggggctctttgctgacatagtcattctgagcagagaaagcgtgtatacggctaattttatgaaatacggatttacgcctggaatgggcgctacctttatcgttcctaaaaaactgggtttcagcctgtcccaggaaatattattgaatgcgggcagctaccgcggagctgatcttgaaaaaagaggggttccttttaaggtgctgccccgtgcagaagtgttagattatgcagtggagctggcgcaagaactggcggaaaagccgagaaactcactggttacactgaaagatcatttggttgccccgcttcgcgatcagctgccgcgcgtcattgaacaggaattgatgatgcatgagaaaacatttcatcatgaagaagtcaaaagtagaatcaaaggtttatatggtaattaactgaaaatatataaaattttgcaggtgaaatggaggcagcgtgatgagaaataatgataatatccgcattttagctaatccttctgtcagtcatggtgagcctttacatatatctgaaaagcagccggcaacaatacctgaagttttatacagaacggcggcggagcttggggatacaaagggaatcatttatttgcagccggatggaactgaagtttaccaatcatacagacgattatgggatgatggactgcgcattgcaaaagggcttcgccaatcaggcctgaaagcaaaacaaaacgtgattttgcagcttggtgacaattcacagcttctccctgcgttctgggggtgtgtgttaacaggggttgttccggctccattagccgttccgccaacgtatgctgaatcgagcagcggcactcaaaagctgaaagacgcatggacgcttcttgataagccagcggtgattacggaccgggggatgcatcaggaaatgctcgattgggcaaaagaacaagggcttgaagggttcagggcaattattgtagaggatctgctcagcgctgaagcggacacagattggcatcaatccagtcctgaagacttagcgcttttattgctgacttcaggcagtacgggaacgcccaaagcagttatgcttaatcatcgtaacattatgagcatggtgaaagggattattcaaatgcaaggcttcaccagagaggatattacgtttaactggatgccgtttgaccatgtcggagggatcggaatgctgcatttgcgggatgtttatcttggctgtcaggaaattaacgtctcaagcgaaacgatcttaatggagccgttgaaatggctggattggattgatcattaccgagcttctgttacgtgggcgccgaattttgcgtttggtctggttactgattttgcagaagaaataaaagataggaaatgggatctgtcttcaatgcgatacatgctcaatggcggtgaagcaatggtagccaaggtagggcgcagaatacttgagcttttagaaccacatggactgcctgctgacgccatccgacctgcctggggaatgtccgaaacttcatcgggcgttattttttctcatgaatttacccgggctggaacaagtgatgatgatcattttgttgaaataggctctccaatccccggcttctctatgagaattgtgaatgaccataatgaattggttgaagagggtgagatcggccgttttcaagtctcgggtctttctgttactagcggttattaccagcggcctgatttgaatgagagtgtgtttacagaagacggctggtttgaaaccggagatcttggctttttgcgaaacgggcgcttaaccataacaggccgtacgaaagatgcaattatcattaacggcattaattattacagtcatgcaattgagtctgcagttgaagaattatctgaaattgaaacttcttatactgctgcttgcgctgtccgtctgggccagaattcaacagatcagctggctatcttctttgttacttccgcaaaattaaatgatgagcagatgtctcagcttcttagaaacatacaatcccatgtctcacaggtgatcggagtcaccccggaatatttgctgcctgtacaaaaagaagagattccaaaaacggctatcggaaagatccagcgcacccagctaaaaacttcatttgaaaatggagagttcgaccacttgctacataaacccaatcggatgaacgatgcggtccaggatgaggagatacagcaagcagaccatgtgaaaagagtaagggaagaaatacagaagcatctgctcacctgtttgactgaggagctgcatgtttcccgcgattgggtggagccaaatgcaaatatccaaagtcttggtgtgaattctatcaagatgatgaagctcattcgatcgatcgagaaaaactaccatatcaaactaacagccagagagatacatcaatatcctacaattgaacgcttagccagctatctatcagaacatgatgacctcagcagtttgtctgctgacaaaaagggcacggacacatataaaaccgaaccggaaaggagtcaggcaacttttcagcctctctctgaggttcaaaaaggattatggacattgcaaaaaatgtcacccgaaaaaagtgcatatcacgtacctctctgttttaaattttcgtcagggcttcaccatgaaacattccagcaggcttttggccttgtattgaatcagtacccaatcttaaagcacgtcatccaagagaaagatggagtgccatttcttaaaaatgagccggcactttcaattgaaatcaagacagaaaatatctcaagtttgaaagagtctgatattcctgcttttcttagaaagaaagtaaaggaaccgtatgtaaaggaaaacagcccgttagtgcgtgtcatgagcttttccagatctgaacaagagcattttttattagttgtcattcaccatttgatttttgacggagtttcgtctgtcacatttatacgcagtctgtttgatacctatcagcttcttttaaaaggacagcagccggaaaaagctgtttctcctgccatttatcatgattttgcggcatgggagaaaaacatgcttgccggcaaagacggtgtgaagcaccgtacatactggcagaaacagctatcgggaactttgccgaatcttcagctgcctaatgtcagcgcaagttcagtcgattctcagtttagagaggatacatacagcaggcggctgtccagcggcttcatgaatcaggtcagaacgtttgcgaaagagcattctgtaaatgtcacgacggtattcttaagctgctatatgatgctgcttggccgttacaccggccaaaaggaacagatcgtcggcatgccggccatggtgaggccggaagaaagatttgatgatgccattggacattttctcaatatgctcccgattcggagtgagctgaacccggcagacactttttctagctttatttcaaaattgcaattaacgatattagatgggcttgatcatgcagcatatccttttccaaaaatggtgagggatctgaatattcctcgcagtcaagcaggttcaccggtatttcaaaccgcttttttctatcagaattttcttcaatccggaagctatcaaagcttgctgagccgctatgctgacttcttttctgtcgatttcgttgagtatattcaccaagagggcgaatacgaattagtatttgaactgtgggaaacagaagaaaaaatggagctgaacatcaagtacaatactgggctgtttgatgcggcttctatatccgccatgttcgaccattttgtttatgtaacagagcaggcgatgttgaatccatctcagcctttaaaagagtattctttattacctgaggcagagaagcagatgattctcaaaacatggaacgccacaggaaaaacgtatccatatataacttttcatgagttgtttgagcagcaggcgaaaaagacgcctgatagagcggctgtcagctatgaaggtcaaacattgacgtatcgggagcttgatgagaaaagcacacagctggccatttatttgcaggcgcatggagtgggtcctgaccgtctggcggggatctatgtggatcgatcgctggacatgctagtgggtttattagcgatcctcaaggctgggggagcgtatgtgccgctagacccgtcctatccggctgaacgattagaatacatgcttgaggacagtgaagttttcattacactgacgacatcggaattagtaaatacgttgagttggaacggtgtcacaacagctcttttagatcaagattgggatgaaattgctcaaacagcctctgatcgaaaagtgcttacacgcactgtcacgccggagaacttggcatatgtcatttatacatccggcagcacaggaaagccaaaaggtgtcatgataccgcataaagctttgacaaactttctcgtttcgatgggggaaacaccaggtcttacggcagaggataaaatgcttgctgtcacaacctactgttttgatattgcagctctggaattatttttgcctttaataaagggcgcacactgctatatttgtcaaacggagcatacaaaagacgttgaaaaactgaaacgggacatccgcgcgatcaaaccgacagtgatgcaggcaacccccgctacgtggaagatgctcttttattcaggctgggaaaatgaagagagcgtgaaaattttatgcggtggcgaagcatttcctgagacattaaaacgatatttcttagatacgggcagtgaagcctggaatatgttcgggccaaccgaaacaactatctggtcagcggttcagcgcattagcgatgaatgctctcatgccacgataggaaggccaatcgccaatacacaaatctatattacggattctcagctcgcgccagtgccggcaggtgtcccgggtgagctgtgcattgcaggagacggtgtggcgaagggctactacaaaaaggaagaattaacggattcgagattcattgacaacccttttgagcctgggtctaagctttatagaacgggagacatggcccgctggcttccgggagggcgaattgaatatataggccgcatcgataatcaagtaaaaatccgcggattccgtattgaacttggtgatattgaaagcaggcttagtgagcatcccggcattctggaatgcgttgtggtcgcagatatggataacctagctgcctattatacagctaaacatgcaaatgcttctctcacagcgagagagctgcgtcattttgtgaaaaacgctttgcctgcctatatggtgccttcttattttattcagcttgatcatatgccgttaactccgaacggaaagatagatagaaacagccttaagaatatcgatttatcaggggagcagctaaagcaaaggcagacctctcctaagaacattcaggatactgtttttaccatttggcaggaagtgctgaaaacgagtgacattgaatgggatgacggatttttcgatgtgggcggggattcgcttctcgcggtcactgtggctgatcgcatcaaacatgaactatcctgtgagttttctgtcacagacctgtttgagtattcaaccattaaaaatatcagccagtacatcactgaacagcgaatgggcgatgcaagtgaccatatgccgacagacccggcagctcatatagaagatcagtctaccgagatgagtgatctcccagactattatgacgatagtgtagcgattattggcatatcgtgtgaatttccaggggcaaaaaatcatgatgaattttgggagaacctcagagacggcaaggaaagcatagcgtttttcaataaagaagagcttcagcgctttggcatttcaaaggagatagcggagaatgccgactatgtcccggctaaagcttcaattgaggggaaagacagatttgatccaagcttctttcaaatctctcctaaagacgctgaatttatggaccctcagcttcggatgctgctgactcattcatggaaagcaatagaagatgccggttatgctgcgagacagattccgcaaaccagtgtttttatgtcggcaagcaataattcttatcgcgcgctgctgccgtcagatacaacagagagcctagagacgccggacggctatgtttcgtgggtgcttgcacagagtgggacgatcccgacaatgatttctcataagctcgggctgagagggccaagctatttcgttcatgccaactgctcatcatctctgattggattgcattctgcctataaaagcctcctgtcgggtgaatctgattatgctttagttggcggtgcaacgctgcataccgagtcaaatatcggatatgtgcatcagcctgggctgaacttttcgagtgatggacatattaaagcttttgacgcttcagctgacggaatgataggcggtgagggcgttgctgttgtattgctgaaaaaagcagctgatgctgtaaaggacggggatcatatctatgccttgctgagaggcattggtgtaaataacgacggcgctgacaaagtcggcttttatgctccaagcgttaaaggccaggctgacgtggtccaacaggtcatgaatcaaacgaagatacagcctgaatccatctgctatgtagaagcacacgggaccggaacgaagctgggggacccgatcgagctggcggctttaacaaacgtttacaggcaatatacaaataaaacgcaattttgcggcattgggtcggtgaaaaccaatatcggacatttagatacagccgccggtcttgcgggctgcattaaggttgtgatgagtctttatcatcaagagcttgcaccgagtatcaattataaggagccgaatccaaatacagacttagccagctctcctttttacgtcgtcgatcaaaagaaaacgttaagccgtgagatcaaaacgcacagggctgcacttagctcgttcgggcttggcgggacaaatacccatgccatttttgaacaattcaaaagggattcagataagggaaagatagacggaacctgcatcgtcccgatctcggcgaaaaataaagagaggctgcaagagtatgcagaagacattctggcctatttagaaagaagagggcttgagaacagccagctgcctgattttgcgtatacccttcaggtggggcgcgaagcgatggagcatcgcgttgtctttattgccgatcatgtaaatgagttaaaacagaggctcacagattttatcaatggtaaaacagcgattgaaggctgttttcaaggaagtaagcacaatgcaagagaggtttcatggctgacggaggatgaggacagcgctgaactcatacgtaagtggatggccaaaggaaaagtaaacaagcttgcagaaatgtggagcaagggagcgaatatagattggatgcagctttacaagggtgagcgcccaaacagaatgagtctgccgacttatccatttgcaaaggaacgatactggccgtcgcaggatgaccgcaaaccggtggcgcagatatccggaaatcagacagggatcggctctattcatccattgcttcatcagaatacatctgatttttctgaacagaaattcagttcggttttcactggtgacgaatttttcctgagagaccatgtggtaagaggaaagcctgtgcttcctggtgttgcgtaccttgaaatggcgtacgcggctataaaccaggcggcaggaagtgaaattggccaagatgtcagaatcagattgaatcatacagtctgggttcagcctgttgtggttgacagacattcagctcaagtggatatcagtctcttccctgaagaagatggaaaaatcacctttgacatttacagtacacaggaagacggggacgaccctgttattcatagtcaaggcagtgcggagctggcatctgccgccgaaacgccagtcgcagacctcactgaaatgtcacgccgctgcggcaaaggaaagatgtcgcctgatcaattttacgaagaaggcagaagcagaggaatgttccatggtccggcctttcaaggaattaagaatgtgaatataggaaacagagaggttttggcgcagctgcagcttccggaaatcgtttctggaacgaatgaacagtttgtgctgcacccaagtatcatggactccgccttgcagacagcaacaatatgcatcatgcaggaattgacggatcaaaagctgattttgccatttgcgcttgaggagcttgaggtgatcaaagggtgttcttcttctatgtgggcttatgctcgcttaagtgacagcgatcactccggaggggttgttcagaaagcggatatcgatgtcattgacgagagtggaagcgtatgtgtcaggatcaaaggattctcaacgagagtattagaaggggaggttcatacttcaaagccttcaacacggtacgaacgcttaatgcttgaaccggtgtgggaaaaacagaatgaagaacgagaggacgaagatccttcgtacacggagcatatcattgttctcttcgaaactgaacgaagtgtcacagacagcattgcctcccacatgaaagatgtccgtgtgattactctaaacgaagctgaaggacatattgctgaacgttatcaatgttacatgcagaacatttttgaactcctgcaaagcaaggtccgtgaactttctgcaggccgtatcatcattcaagcgattgttccgctggaaaaagagaagcaattgtttgccggcgtttccggtctgtttaaaacagcagaaatagagttcagcaaactgactgctcaggtcatcgaaattgagaaacctgaagagatgatagaccttcacctcaagctgaaagacgacagccagagaccatttgacaaacagattcgatatgaggctggacaccgttttgtgaaaggctggagggaaatggtgcttccttcagctgatatgcttcacatgccgtggagagacgaaggcgtttatctaatcacaggcggagcaggaagcttaggccttctgtttgcaaaggaaattgccaatcgaactggccggtctactattgtgctgacgggacgatctgttttaagtgaggataaggaaaacgagctggaggctcttcgaagcatcggagcggaggttgtctatcgggaggctgatgtaagtgatcagcatgcggttcgtcatcttttggaggaaatcaaagaaagatatggcactctcaatggaattattcacggtgcaggcagcattaaagatcgcttcatcattcataaaacgaatgaagagtttcaagaagtgttgcagccaaaagtgagcgggttgttacatgtagacgaatgcagcaaggatttcccattggactttttcattttcttctcttctctttcgggatgtttaggaaacgctggacaagccgattatgcggcagccaattcgtttatggatgcatttgctgaataccgccgttctcttgcggcatcaaaaaagagattcggctccaccatttccttcaattggccgttatgggaagaaggcggtatgcaagtcggcgctgaagatgaaaagagaatgctgaaaacgacgggaatggtcccgatgccgacagatagtggcttgaaagcattttatcaagggatagtatctgataagccgcaagtttttgtgatggaaggacagcttcagaaaatgaagcaaaaactgctttccgcaggatcgaaagccaagcggaacgatcagagaaaggcggatcaggatcaaggacaaactagaaaattggaagcagccttaatccaaatgattggcgcaattttgaaagtaaacactgacgatatcgatgtcaacacagagctgagtgagtacggattcgactcagttacattcactgtctttacaaacaagatcaacgaaaaatttcagttggagctaacaccgaccattttctttgaatatggtagcgtccaaagcctggctgaatatgtagttgctgcgtatcagggcgaatggaatcaagatgctactgctaaaggcaaagatgaaagaacaaacttagtgcacagtttaagcagcctggaggcatcattaagcaacatggtcagtgcaattttaaaagtaaatagtgaagatattgatgtcaatacagagctgagtgaatacggatttgattccgttacatttacggtctttacaaacaagattaacgaagaatttcagttggagctaacgccgaccattttctttgaatatggaagtatccaaagcctggctgagtatttgactgctgaacatgaggacaccctggttcaggagcgcgaaaaaccagaggggcaggaagagttacagacaaaatcccctgaagcgccgaaaatcacatcacgtagaaagcgccgctttacacagcctgttattgcaaaagcagaaagaaacaaaaagcaggctgccgattttgagccggttgcaatagtcggcatcagcggccgattccctggcgctatggatatagatgaattttgggaaaacctagaagaagggaaagacagcatcacagaagttccaaaagatcgatgggattggcgggagcattatggaaacccagacactgacgtcaataaaaccgacatcaaatggggcggatttattgacggtgtcgctgagtttgatccgttgttttttggtatttcgccgcgagaagctgattatgtagaccctcagcagcgcttgttaatgacatacgtgtggaaggcactggaagatgcgggttgctcgccgcaaagcctttcgggtacagggaccggtatctttatcggtacgggaaacaccggttataaagatctattccatagagcgaatcttccaattgaaggccatgctgctacaggtcatatgattccttcggtaggcccgaatagaatgagttattttttaaatattcatggtccgagcgaaccagtagagacggcctgttccagttctcttgtagccattcaccgtgctgtgactgcgatgcaaaacggtgattgtgagatggcgatcgctggaggcgtgaatacgatcttaaccgaggaggcgcatattagctacagcaaggcgggtatgctcagcaaagacggcaggtgtaaaaccttctccgccgatgcgaatggctatgccagaggcgaaggggtcggaatggtcatgttgaaaaagctggaagatgccgagcgcgacggaaatcatatttatggcgttattcggggcacggcggaaaatcacggcggaagagccaataccctgacatcgcctaatccgaaagcacaagctgatttgttggtgcgtgcatatcgccaagcaggcatagatccaagcactgtcacatatatcgaagcacatggaacagggacggaattgggcgatccgattgaaataaatgggctgaaagccgcgtttaaggaactatccaatatgaaaggcgagagccagccggatgttccggatcaccgttgcggcatcggctcagttaaaagcaatatcggtcatttagagctagcagccggtatttccggtttgatcaaagtgcttttgcaaatgaagcataaaacgttagtgaaaagcctgcattgcgagacgcttaatccttatcttcagctgacagacagtccgttttacatcgttcaggaaaaacaggaatggaagtctgtcacagatcgtgacggaaacgagcttccgcgccgtgccggaatcagttcgtttgggattggcggagtaaacgcgcatattgtggttgaagaatatatgccaaaagccaattcagaacacacggctacaggacagccaaacgtgattgtgctgtcggctaaaaataaaagcaggctgatagatcgtgctttgcaattgcttgaggcgatccgcaataaaaaatatacagatcaggagttgcaccgcatcgcttacaccctgcaggtcgggcgcgaagaaatggatgagcgtctggcgtgtgttgcggggacaatgcaggaacttgaagagaaactgcaggcgtttgttgacggtaaggaagaaacaggcgaatttttccggggacagtctcatcgaaataaagagacccagactatatttacagcagatgaagatatagcgttggcacttgatgcttggatcagaaaaagaaaatacgccaaacttgctgatttatgggtcaaaggggtctcaatccagtggaacacattatacggagagaccaaaccgcgcctgatcagcctcccttcatatccgtttgcgaaggatcactattgggtgccgacaaaggaacattcagaaagagacaaaaaagaactggttaatgcgattgaagatcgggctgcatgctttttgacgaaacaatggagtttgagtccaattggctcagcagtgccggggacaagaactgttgccatcctgagcaatcaagagacagcagatttagcagcagaagtgtcttcgtattttccgaatcatctcttattagatgtgagccggatagaaaatgatcagtcagacattgattggaaagagtttgacggcctagtggatgtcatcggatgcggtaaggatgatgagggccggctggattggattgaatgggtgcaaagactggttgaattcgggcataaagaggggctcaggctgctttgtgtgacgaaggggctcgaatcgtttcaaaacacatctatccggatggctggcgcctcacgggctgggttgtatcgaatgctccaatgcgagtacagccatcttatatcaaggcatatggatgcagaggaggttactgatcatcgccgtctcgcgaagttgatcgctgatgagttttattccgattcttatgatgcggaggtttgctacagggatggtttacggtatcaagcttttctaaaagctcatccggaaacaggtaaggccacggaacagagcgcggtcttcccgaaagatcatgtgcttctcattacaggcggcacacgaggcatcggactattatgcgcccgtcattttgcagagtgctatggagtgaaaaaactggtgctgaccggacgagaacagtttcctccgcgagaggaatggactcgttttgacacctcgaacacatcagttgcccagaaaatccaggcagtgcgggagctggaagcgaagggtgtacaggtggagatgctgccgctgacgttatctgatgatgctcaggttgagcaaacgttgcaacatatcaagcgaacattaggaccgattggcggtgtcattcattgtgcaggtctgacggatatggatacgctggcatttatccgaaaaacttcagatgatattcagcgggtgctggaacctaaggtgtcaggtcttacaacgttatatcgccatgtgtgtaacgagcctttacagttttttgtcttattttcttctgtttcagccattattccggagctttcggcgggacaagctgactatgctatggccaatagctatatggattattttgcagaagcacatcagaaacatgcgccgatcatcagtgttcagtggccgaactggaaagaaaccggtatgggtgaagtgacaaatcaagcgtatcgggaaagcggcttgttgagcattacgaattcagaaggcttacgttttctagatcaaattttatcgaaaatgttcggaccggttgttctccctgcgatggcgaatcaaacaaactgggagccggaactgctgatgaagaggaggaaaccgcatgagggcggtttgcaggaagctgctttacagagcccgccagctagagacattgaagaggccgatgaagtttccaaatgtgatgggttattatctgaaacacagtcctggcttgttgatctgtttaccgaagagctgagaatagatcgtgaagacttcgagattgacggggtgtttcaggattatggcgtggattcgatcattttggcacaagtgctccagcgtataaaccgcaaattagaagcagcactcgatccatcgattctatatgaatacccgacaattcaaaggttcgcagattggctgatcggttcttattccgaaaggctgtccgctttattcggaggcaggatatcggatgcatcagcacctttggagaacataatattggcggaggcagctgttcctgcggaggatcgagctcttacacctcagattcaggcgccagcgattttgtcaccggactctcatgcagaaggtattgccgttgtcggactctcttgccgattccctggggcagatacattggagtcatattggtcgttactatccgaggggcgttcgtcaatcggcccgattccggcagagcgttggggctgtaagacgccatattatgccggcgtgattgatgacgtcagctattttgatcctgatttctttttgcttcatgaagaagacgtaagggcgatggatccgcaagcactgctcgtattggaagagtgtctgaaactcttgtatcacgccggttatacgcctgaggaaataaagggaaagcctgtcggtgtttatatcggaggcagaagccagcacgaacctgatgaagagagccttgatcatgccaagaatccgatcgtgacagtcggccaaaattatttagcggctaatctttcacaattttttgatgtccgcggcccgagtgttgtagttgacaccgcatgctcgtcagctttggtcggcatgaatatggccattcaggcgctgcgtggcggagatattcaatccgccatagtcggcggtgtcagcttgctgagctcagatgcctctcacaggctgtttgaccggcgcggcattttaagcaagcattcatccttccatgtgtttgatgagcgtgctgacggagttgtgttaggtgaaggcgtcggaatggtcatgctaaaaacggtaaaacaggcgctggaagacggagataccatatatgctgttgtgaaagcggcctcggtcaataatgacggaagaacggcggggcctgcaacacctaatctggaggcgcaaaaggaagtcatgaaagatgcgctttccaaaagcggaaaaaaaccagaggacatcagctatcttgaggcaaacgggtcaggttcaatcgtaaccgatctccttgagctaaaagcgatccaatcagtgtaccgttctgggcactcatcgcctctttctcttggctcaatcaagccgaacatcgggcatccgctatgtgctgaagggatcgccagcttcattaaggttgtgctgatgctgaaagagcgccgctttgtcccatttttatcaggtgaaaaagagatggcgcatttcgatcaacagaaagcgaacatcacgttcagccgagccctggaaaaatggacagattcgcagcctactgcggctattaactgctttgccgatggggggacgaatgcccatgtcatcgtagaggcgtgggaaaaagatgaaaaacacgccatcaagcgcagtccaatatcgcctcctcaattaaagaaacgaatgctttcgccaggcgagacaaagctggaagcggagacttcgaaaatgactgcggcaaacatatgggatacttatgaggtggaggtctaacgtgaaaaagataacgaaacaactcacattatcgttaaaaaatccgtttatttatcaccatgtggtttacggacaaaatgtcctgccgggattggcttatatcgatataatctaccagatattcagagaacacggcttctcctgctcagagcttcagctgcggaatttatccatctatcagccattgacggcggaacaggatgcagtaattgttctgaatatccaatgcgcggagaaaaaagaaggacagtggcaaatcacagccaagggaactgaaaaacgtgatgggaaagaagcttcagaagaaaagctctatatgaaggctgatatgtacgcagactccccagccatatttgaagaaacactggatctcagtcaaatcaaagcatctgcacagaacgttgttcagcttgatgatgtatatgaacaatgcagacgtcaggaattggtgcacagcgaatatatgaaagcaaaaggctgcatctatgaagaggaagatggcgtccttcttgagctttctctcggttcggaagccatgcttcacgcagaaggctttatgtttcacccgactctcatagacgggagcggggtgggtgccaatcatttgctcacatctttgcttaaaggagaacagaggctgtatttgcctctgttctatgaatccttttccgcttctgcacttttgcagtcgaattgcatgacgagaattaagcgctcctccgtccggcgggaaaaagagctgatttatgtaacacttgaattttttaatgcgtcgggagaaaaagtggctgagttgaaaaactttacaagcaaattggtgcgagaagcggagctgattagcggaaaacatcaagatgcacaggagacacagatgacaagagcggacactgctgagcgtgataaacctgctgacatggtatcttctcccgttaattcctatagtgaggctgaacagttcgtaagccaattaatcgcagagaaaatcaataagccggtagaacaagttgaaaaacaggtcggttattaccaaatgggactgaattcatcgggcttgcttgaggtggtagaaacgatcagtgataagatcggtgagagcctttcgccgactcttctgtttgagcataccaccatagcggaactgtcagcgtttcttgccgaggaatatgctgagcattttagtgccgctggttcccttggccttggccagaatgaaagagcacgcgtttccgacagcataaacgaccgtaagactgttgaagcttctcgtcctgcacctattgaggcagcaggcgatattgcgattatcggcttggcgggcaggtatccgaaggcagccaatattcatgaattttggaacaatctgaaagaggggaaggactgcgttagcgagattcctgagtcgcgctgggattggcagaaacttgaaggaatcacatctccttcgggtaaggacatttccaaatggggaggatttattgatgatcccgactgctttgatccccaatttttcagaatcacgccaagagaagcggagacaatggaccctcaagagcggctgtttttagaaacatgctgggaaacgattgaggatgcgggctatacgccaaagacgttggccaagcctaaaggacgaaataaaaggcagcatgtaggagtttttgccggtgtcatgcacaaggattatacattagtcggagctgaagaagcatcagcagaaaatgtgtttcctctttcgctcaactatgcgcaaatcgccaaccgtgtttcttacttttgtaatttccacggtccaagtatggctgtcgatacggtatgttcatcctctttgaccgcagtgcacttggcgttggaaagcatacgtcacggtgagtgcgatgttgcgttagcaggcggagtgaacctgtctttgcacccgaataaatatatgacatacggggtctgggatatgttttccactgacggacactgccgtacgtttggaaaggatggagacggttatgtgcctgcagagggtataggcgcggttttattaaagcctttgcgccaggcagaggaagacggagatcgcatttatgcagttattaaaggaagtgctgtgaatcatgtgggcactgtaagcggcatttcagtgccgagccctgtttcccaagctgatctgattgagacatgcttggagaaaacgggaatcgatccgcggacgatcagttatgtggaagcccatggaaccggcacgtccttaggagatccgatcgaaatacagggattagtgaaagcgttccgccaatatacgcaggatcggcagttctgttcaatcggttctgtaaagtcaaacattgggcacgccgaatccgccgcggggatcagcggtttaagcaaggttgctcttcagcttcaccatcaaaaacttgtgccttctttgcattcggaagaactgaatccgtacgttgattttgaaaagtctccattttatgtacagcatgaaacagaaacgtggaagcagcctgttatcaaggagaatggggaagacgtcccttatccgcgacgggcggggatcagttcttttggcgcaacaggttcaaacgcacatattatccttgaggaacatattcctcaagcagcggagcaggacgtttctttgtcctcagattctgacatatccgcagttattccgctttctgcccgtaatcaagaacgtctccgtgtatatgcaaaacgtctcttggattttcttcatgatgggattcagattagagatttggcgtatacattgcaggtaggccgtgaaccgatggaagaacgggtttctttcttagcatccggaattcaagaattgagcgaccaattgaaggcttttatagaaggacgaaaagccattcagcattgctggaagggccgcgtgtcaagaggaagcgaaccatcgcgtcccgccgaatcggtacataaattgctggagcaaagaaaactcgatcagattgcggagcagtgggcgaacggatctggtgttgactggaagctgctttacgagggaagcaaaccaaagcggatcagcctgccgacttacccatttgagagggtgcgttattgggtgccgaaagcggagaaaaagactgatcgttcaaaacaggagcggcacatcctgcatcctcttctgcatcaaaatgtgtccgacatatcgggtgtccgcttccgttcagcgtttacaggacgtgaatttttcttgaaggatcatgtcataaagggcgaacacgttttacctggcgcagctttattggagatggttcgggcagctgtggaaagggcagctgcggatcagttcccgacaggattccggctccggaatatcgtctgggtccggccgttcgccgtcacggaacagcagaaagatatagatgtacgtctatatcctgaggaaaatggtgagattacatttgaaatctgccgggaccctgaaagcgcagaggagtcgccgattgtatatgggcaagggagtgcagtgctttgtgaggctggtgaaaatccggttatcaacattgaagaattgaaggcaagctataatggccggacgctgtcaccttttgattgctacgaggcttatacagaaatgggtattcattatggtgacagccacagagcgatcgacagcctatatgccggcgaaaacggagttctagtgaaattgacgatgcctcctgtaatctctgatacagaagaccattatattctgcatccgagcatgatagattcggcatttcaagcatctatcggtttgaggctgggaggagctacgagtttagaagacagaaaggcaatgctgccttttgccatacaggatgtccaaatcttcaaaggctgcgaggcatctatgtgggcgcggatcacatatagcgagggcagtacagctggggatcgtatgcagaagcttgatatcgatttatgcaatgaagaggggcaggtttgcgtgcgattgacgggctattctgcaagagtgttagaaacaggtcaagaagatccttctgaagcgactgacacgctattgttcgaacatatttgggaagaacgtgctgcagagaggaaagagctcatagagtacgacacacataaagtcgttatctgtgatgttggagaacaaatggaaagcctccaaaatcatcttgactgtacagttctgcagcatgatacagagacaattgatgaacggtttgaaggttatgccatacagttatttgaagaaatcaaacagctaatgcactcaaaaacagggggacatacattcattcaagtggcggtgcctgcgttggacgagcctcagctattaagcggcttaactggattgctcaaaacggctgaactggaaaatccaaaactgacaggacagttgatcgaaatagagaccgggatgtcagctggtgacctattcgaaatattggaggaaaacagacgctatccgcgtgacacgcatatccgtcactggcaagggaagcgatttgtaagcaagtggaaagaagtgtctggtgagcacctaagagctgatatgccatggaaggataaaggcgtgtatctgatcacaggcggtgcaggcggtcttggattcatctttgcaactgaaattgcgaaccaaacgaatgacgcggttgtgatcctgacaggacgctctccgcttgatgaaaggaagaagaagaagcttcaagccttacagaaacttggcatccaagcgatttacagacaagctgatctggctgacaaacaagcggttgatgccttattaaaagaaacccaaaacgtttacggagacttagatggcatcattcatagcgccggtttaataaaagataatttcattatgaagaaaaagaaagaagaggttcaaaccgttcttgctccaaaggtcacaggactggttcaccttgacgaagcaacgaaagatattccgctcgatttctttatccttttttcctcaggtgccggagcagtaggaagcgcgggacaggctgattacgcaatggccaatgcatttatgaatgcatttagcgaatatcgtaatggccaagcagagctgcacaagcgttacggaaaaactctttcagtgtgctggccgctgtggaaagacgggggcatgcaaattgatgcggaaactgcaaggatgctgaaaagagaaacaggcatggtggccatggaaacagatcgtgggattcaggcgctatatcatggctggacgtcagggaacccgcaagtgttagttgcttccggtgttactgatcggattcgtgcatttttacatgaaacgggacatggcaaaggccaatctcacaatatcaaaaaaagcagtctcaatcaggaggcagaaaaagcagacatcattggggaaattgatgaagagatactaagagaaaaagcggagaactattttaaacaggtgctttcttcggtgattaagctgccagctggccagattgatgctgaagctcctctcgaggattacgggatcgattctatcatgatcatgcatgtaacgggtcaattagaaaaagtattcggatctttgtccaagacgctgttctttgaataccaggatattcggtcattaacccggtattttattgattcccgcagagaaaaactgctggacatcttgggatttgaaacgggaaaaccttctgttgaaagaaaatcagaacctgaaaaacaagaaatcccagttatcccaagaaagtctggatttcttcctttgcaagataaagagcagaagcaggtaagagagaaggaaacggaagaaattgcgatcatcggtatctcaggtcgctatccgcaggcagacaacattgatgaattatgggaaaacctgagggacgggcgagactgtattacggaaattcctgcagaccgctgggatcacagtctttattatgacgaagataaagacaagcctggaaaaacctacagcaagtggggcggcttcatgaaggatgtagacaagtttgacccgcagtttttccatatttcgccgcgtgaggcaaaattaatggacccgcaagagcgtttatttttgcagtgcgtgtatgaaacgatggaagacgcaggctatacaagggagcatctcggccgtaagcgtgattcggagcttggcggaagcgtcggtgtttacgtcggtgtcatgtacgaagaatatcagctgtacggggcacaagagcaggtgcggggaaggtctctggctttaacgggaaatccatcatccatcgcgaaccgagtatcttattattttgattttcacggaccgagtattgctttagacaccatgtgttcttcttctttaacggctatccacttggcctgccaaagcctgcagcgcggagagtgtgaggcggcattcgcgggcggcgtgaatgtgtcaatccatccaaataaatatttgatgctcgggcagaacaaatttatgtccagcaaaggccgatgtgaaagcttcggacagggcggagacggctatgtgccgggggaaggcgttggagcagtgcttctgaagccattgtctaaagcagttgaagatggtgatcacatttatggaatcattaaggggacagccattaaccacgggggaaaaacaaacgggtactcagttcccaatccgaatgcccaagcagatgtcatcaaaaaggcgtttgtggaagcgaaggttgacccgtgggcagtcagttacatcgaagcccacggcacgggaacctctctcggtgatcctattgaaatcacagggctgtccaaagtgtttacgcaagaaaccgatgacaaacaattttgtgcaatagggtcagccaaatcaaatatcgggcactgtgagagtgcggcaggtatcgcaggagtaacgaaggtattgctccaaatgaaatacaggcagcttgcgccttccctgcattcaaacgtgctgaacccgaatattgatttccttaactcgccgtttaaagtacagcaagagctagaagagtggaagaggccgatcatcagtgtcaatggcaaagacatcgaattaccgagaatcgcaggagtctcttcatttggtgccgggggtgtgaacgcccatattttaatagaagagtatgattcggaacctgtggaggagcgtttaccagcgaggaaacagccggctgtcattgtgctctcagcaaaaaatgaggaaagacttcagaaacgcgcggagcgattgctgcataccattcgtgaacaaacatatgttgaagcagatttacaccgaattgcctatacgcttcaagtcggacgggaagcgatgaacgaacggctggcgttcgttgcggaatcgatgcgggagcttgaagaaaagctgaatgaatgtatctccggaacagaaaatcgtgaatatgtctatcgcggacaagtaaagcgcaacaaagaagccattgctgcttttgctgctgatgaggatatgtcaaaaacaattgaggcatggctgcaaaaaggcaaatatgcgaaggttttagacctatgggtaagaggtttgcgcatcgactggagcacgctatatcaggatcaaaaaccgcagcgcatcagtttacctgtctatcctttcgcaagagatcgctattggatagacgtacatgcaatggctgaggaaaaaagaacggaggagccattcgctccggtacagcccgtccttccaaagccgtctgtagccagagaagccagcggcaagcctgccaatattacgttacagcctttaatgaccaatcaggatcgtttagagcgttttccatcagatacagaaacagagacgatcacggcggaagccttgtgcgatgaactgacagcgggcttagcggaagtgctgtacatggaccaaaacgagattgatccagacgaagctttcatagatatcggtatggactcgattaccgggctcgaatggataaaagcaataaataaacagtatggcacatcactaaatgtcacaaaggtatatgattatccgacaacacgtgatttcgctgtttacttagcacacgagttaagcacacaggctggggagaaaaaacaaacggagacgtacacgccgatcagacaaaaaacagcggtacctgctgctaaaccggctaatatatctctgcagccgttagaacatcatcagccagtgcaagaggagggtgaagaaacgattcaatatgcagcggcagaaatatctgcatcaagacaatatactgtagcaattgaaacgctgcatgaaaacttgagggaaagcatagcagacgtgttatacatggagccatacgaggtggatattgacgaagcgttcatagatatcggaatggactcgattaccggactcgaatggataaaagcggtgaacaagcaatacggaacgtcttttacggtaaccagggtatatgattatccaacgatacgtgattttgccgaaatgctaaagtccgagcttggaactcatcatgatagagaggtagagcatactgttcctatcgaagcagtccagcaaaagccagcagcaccatctaatccaaagccggcagaacggccccttcagcctgttcaacatccaataaagaaagaacatgagaagaaaacggtacctgttcatcaagactacccggaggatgcgatagcgattgtcgggatgtcgggaagatacccgggcgctcgtaatgtaagagagtactgggataacctggttcatgcgagaaatgctattcgggacattccaacatcacggtgggatgttgacaaatactatgatcctgtcctcaacaaaaaaggaaaagtctattgcaaatcaatggggatgcttgatgatattgaacattttgatccgttgttttttaatattccgccgtcagaagctgaactgatggacccgcagcatcgaatctttttgcaggaaggctataaagcctttgaggacgctgggtacaacgcccgaactttaaatgagaaaaaatgcggtgtatatctcggcattatgagcaatgaatacggggtcatgctgaaccggcaggcaagagcaaatgccaccgggaacagctttgcgatcgctgcggcgcgtattccatattttcttaatttaaaagggcctgcgattcctattgacaccgcttgttcatcttcattggtcggcacacatttagcgcggcaggcacttataaacaaagaaattgatatggcgctggtcggcggggtcagcttatacctgacgccggaatcttacatcagtatgtgtgaggccggcatgctttcacctgatggacaatgtaaagcatttgacaatggcgcgaatggttttgtgcccggcgagggtgcgggtgcgctggttctgaaaaggctgaaagatgcagaagcggaccgtgaccatatttatggcatcatcattggctcgggtattaatcaggacgggaaaacaaacggaatcacggcaccgagtgcaaaaagccaaatggacctggaaagagacatatatgaaacatacggcatacatcctgagagtatcagttatgtcgagatgcatggcacaggaacaaaacaaggcgatccaattgaattagaagctctgtccaccgtatttcaagaaaaaacagacaaaaagcagttttgcgcaatcggttccgtcaaaagcaatattggccatacatccgcggcggcaggagtagccggggttcaaaaagtgttattatgtatgaatcataaaacacttgtgccgacattgaacttcacgacaccgaatgagcattttgaatttgagcattctcctttatacgtaaatacggagcttaagccttgggaaacgggtgatggaaaaccgcggagagcatgtgtgagctctttcggatatagcggaacgaatgcccatatcgtgatagaggaatatcagcctgaaaagaggagcgatccattaacaaagcagcaccgctcagcattatttgtactttcagcgaaaaaagagaagcaattgaaggcctatgcggaagcaatgaaagatttcgtaacttccaatgaagatatcgatctggaggatatggcatacacacttcagacgggccgggaagcaatggattatcgcatggcgtttttggcggattcgagagaaatgctgatcaaagctttagatgattatttggctgaaatgccgaacggcagcatatttgctgctcacgtgaaaacgaagaagagcgaaatcaagctgtttgaaacggatcatgatgccaaagcattgctgcaaacatggatagagaaaaaaaggctggagaaagtagcagagctatgggtgaaagggctgcagatagattggaacaagctttatggggaatacacgcctcgccgaatcagcctgcctgcttatccgttcgcggaagagtattactggctgccaactcaagaaggcgaacccgaaaccattgctacagcaatgcctcaattcgaactgatgccaaagcgctgctttctgcgtaaacagtggcagccttgtccgattgaaccggcagaaatgacgaatcaaaccgtcgccattttggcaaatgaggagacaatggcattagcggaagagctttcgacgtatttctcgacataccgtatatttgacagccaagagctggatcgggtatctgctgctgactatgaacacgttgctggagcaatcgatctgatcgggtgcggaacgagccatgagcattctatgggctggataaactggctccaaaagctgatcgagcaaggacgtgcaagcaagcatcatttgacggtcttgggtgtaacaaaggggctggaggcctacgcaaatgagggtgttattttgtctggtgcttcacgggccggtttataccgcatgcttcaaagtgagtacagccatcttacttcaagacatgcagatatggaatgcgaagcctctcatgaggagctggccagactgattgcagttgaatattatgccaagagcacagaatcagaagtctgttatcgaaacggacagcgatatcgcgcatatttgacagagcagccagcagaagccgctctaagtcataagcaagtatcgttttcaacagacaaagtcctgctcattacaggcgggacaagaggtctcggcttgctgtgtgcgcggcattttgtgaaaacatacggcgttaagcggctggtccttatcggccgtgaagagcttccaccgcgtgaccagtggaatttggtaaaaatttcctcgcttgccgagaaaataaaagccgttcaagagctagaagacatgggtgcgcaagttcaggtgctgtctctggatctcacagacagggttgctgtcgaacagagcctgaagacaatacacgaaacaatgggggcgattggcggagtcatccattgtgccgggatggtgaacaaacaaaacccggcttttatcagaaaatcactagaagagatcggacaggtttttgaaccgaaagtcgaaggtctgcaaacgttgtttgacctgcttcaagatgaaccattggcgtttttcaccttgttttcatcagtatcagcggccatccctgcactagcagcaggacaagctgattacgcgatggcaaatgcttttatggattattttgcggaggctcatcaagataaatgtcccattgtaagcattcagtggcctaactggaaggagaccggtttaggcgaggttcgaagcaaagctttagaacaaactggattgatcagtttgacaaacgacgagggattacagctgcttgaccagattctatcagacagacagtatgctgtcgtgctgccggcagtaccagatacaaacgtttggaagccggataagctgatgcagccgtcattgcctgtcgaagctctctcgcatcctgagacgaaagagcaaaccggcactcgcaacctgttccctgaaacagtcgactggctcgtaactcttttttcagatgaactgaaaatagctgcagaagactttgaaacggatgaacctttccaagaatacggaatcgactcgattatattggcccagctggtacagcagatgaaccaacaattaaatggagatattgatccgtcaatcttgtttgaatacccgacaatagaatcctttgcacactggctcatttcgaaatatgacatatcagctgttttacagccatctgttcctgagaaacagacacctctcaagccgcaatcagcaatgaaacagaagctggtgccagaacagcggccgcaacagataagccatgaaaaaacggcacttcttgctgaggacatcgctatcatcggtcttagttgcaggttcccgggagcggaaaccctagaggaatactgggatttaatacgtgatggacggtctgcgattgcgcctgttccgcctgaacgattcgggaactccagctcgaattacgcgggcctcattgatgaaatgaaccgatttgatcatgatttcttcatgatgtccgaaagcgatgtcagagcgatggaccctcaagctttggctgtattggaggaaagcttgaagctatggtatcacgcgggttatacagagaaagaagtgaaaggcatgagggctggtgtttatataggaggccgcagccagcacaagcctgatccggccagtctttcaaaagcaaaaaatccgatagtcgctggtggacaaaactatttagcggctaacatctcacaattttttgacttgaagggaccgagtattgtcctggataccgcttgttcctctgcactggtggggctgaatatggccattcaggctctgcgaagcggagatattgaggcagcggttgtaggcggcgtcagtttgcttgatgctgatgcgcatcgaatgtttcatgagcgcggacttttatgtgacaaaccgtcattccatatttttgataagcgggcagacggtgtcattttaggagaaggcgtgggcatggttctcgtcaaaaccgtcagccaagcggttgaagacggagattccatatatgcagtcattaaagccgctgcgattaataatgacggaagaacggcaggcccatcatctccgaatctcgaggcacaaaaggacgtcatgctgtcagcgcttgaaaaaagcggcaaaaagactgaagagatcagctatctcgaagcgaacggatcggggtcggcagtaacagatttacttgaattaaaggcaatccagtccatttaccgttctgaatcaaaggctccgttagggctgggatcggtgaaacctaacatcggccatccattatgtgcagaggggattgcgagcctgattaaagtagctttaatgctgaagcatagacaattggttccgttcctgtcaggtaatgaaaatatgccgtattttgatatagaaaaaacagatttgtatttcagcagatcgcaagccgagtggaaggagacaacgccggctgcggcaattaattgttttgcagatggcggaacgaacgcccatctcattatagaagcctggaatgaatcggttgctcgtccaattagaagaaaacctctgcctttgccggaattaaataggcagcccgttttaatcaaaccatcagctcaaaacgtgcaggaaaaagtgcattcagacacaggggcttctaaagatatgttttggaaaactttcaaataagagaggagtgggaaaatgataactgaacaactgcacatttcattaaataatccaatcatgtccaaccacaaggtatatggacaagcgttattacccggccttgcttatatagatttgatctaccaagtattccaggaacatggttatgtataccaagagcttgaattaaaaaacctgaccattttttaccctttgatcgcagatgagtcatatgacattgccctgaccattcacgtgtctgaaagaaaggaagggacatggtccatcatcatcgacggacaaaaacagcatggagaatcactatctgacaagagacaatatgtgactgctgacatgcatcgtaaagagcaaaccgcttttgccgaatcaatagaccttaatcagtggaaaagtacagctgacaggattctgaatttagatgaaatctatgaacaatgccgatctcaagagttagtgcataccggcatgatgaaggcggaaggacagatttatgaagccaaagagggggctgtaattgatttagcagtcggacaggaagcattgcgtcattctgatgcttttctgtttcatccgacgcttattgacggcagcggcataggttcaagctgcctgatctcagatcaaacgatgtacctgccattgtattatgaatcgttttctgcttcagaacgattgcaaaaaggatgtacagcacggatcctctcctcatctgtgcgccaaaagaaagagctcacttatatgacgattgaatattttaattcatcaggacaaaaagtggccgagctgaaacaatttgcaggcaagtctgtacggaatatgtcagcctttcattctccaaaagaaattcaagaagaaagagctgctgtctctcagaacatcagtcaggactatcccgcatttgaaatgtatttgcgtcagctgcttgctaagcagcttgaaaggccggcagaacaaatggatatccacgctgggtactatgagcttggtctggattctccgtcattgcttaccgtggttcaggaaattggagataaggttggagcggatcttgctccgacactgctgtttgaatttacaacaattgcagaactagctgctcatcttgctgatcactattcaattggagaggcggacgatgctgtccgccaatctccttcaccaatgaaggattctcctgatggtgttacctcttcaccagagatcggggaggacattgccattatcggaatggcgggacgctatcctaaggcaaaaaacatacaggaattttgggaacatcttaaagcgggtaccgactgcatcacagagattccaaactcacgctgggagtggaaagaaaacaatggacaggattcacctgcaggcaagccactctcgaaatggggcgggtttatcgaggaggctgattgctttgatcctcaatttttcagaatctctccgcgtgaagcggaaatgatggaccctcaggaacggttatttttagagacatgctgggaagctattgaagatgcgggttatacaccagagacaattgcttcaccgcagggagaaaataaaagacagcatgtcggtgtgtttgccggcgtaatgcataaggactattcccttataggggctgaagctctatcagaacacaatccatttcctttatcgctgaattatgcgcaaatcgccaacagggtctcttactattgtaatttccacggcccaagcatggcggtggacacggtctgctcttcctcattaactgcggttcatctggcaatagagagcatccggaatggagaatgcgaggccgcgcttgccggaggcgtcaatttgtcattgcatccggctaaatatatcagctatggcagtgtaggaatgcactcaagtgacggctattgccatactttcggcaaagacggagatggctacgtatctggagaaggtgtcgggacagtattgctaaaaccgctgcgaaaagctgaacaggacggtgaccgaatctatgctgtcatcaaaggaagtgcgataaatcatgtaggaaaagtaagcggaattacagtaccgagcccggtagctcaagctgatgttatcgaagcgtgtctagaaaaaacaggaattgatccgcgcaccatcagctatgttgaagcccatggcactggcacctcattgggagatccgattgaaatacaggggttagtaaaagctttcagccgcaatacgcaggacaagcaattctgttcaatcggttctgttaaatcgaatattggccatgctgaagctgcagccggcattagcggcttaacgaagactgtcctgcagctgcatcataaaaccttggtgccgtcattacattcagaagagctgaatccttatttgaagcttgatcaaaccccattttttgtccagcatgaaacaaaggaatgggggcagccatcttttacagaaaacggggtggacgtcacatatccccgccgtgccggtttaagttcgtttggcgcttcaggatcaaatgcgcatcttattttggaagaatatattccggccgagagccattcagaaacgattttaacgaaaaatgaaggaatagtgatacctttgtctgcgagaaacaaagatcgtctgcaggcttacgctcttaaacttcttgattttcttagcgaggacgtcaatcttttagcgttagcttataccatgcaggcagggcgggttgaaatggaggagcgtgcggccttcatcgtaaaagacataaaagatttaacggctaaacttcgggcgtttgccaatggagaagaagagatcgagggctgctggaccggacaagccaaggagaatcaggaggcggctgggctagcatcggtaaatgcgctgaataacaatttgacaacagacagtgaaatgatggaaatggcgaaagcatgggttcaaggacagcgggtcacctgggacgacctatacggcgatcgcaagccgcttaaaatcagtgttccgacctatccgtttgcaagggagcgctactggatcccggttcctgaaatgaaaaccagcactgtgaatcatatcttacatccgctggtgcaccgcaatacatcagactttactgagcagcgctttagctctgtatttacaggcacggaatttttcctttcagatcatgttgtacagggacagaagattttgccgggcgttgcctatttagaaatggcaagggaagcagcggaaaaagctgcaggcgatctggacggcaaacaaagagtggtgtcgcttaaagacattgtgtgggtgcgtcctatcacgattgaaagtgaaccaaaagaaatacatattggcctttttcctgaggataacggggaaatctcctttgacatttatagcagctctgaacataaagaagaagccctgacgatacactgccaaggccgcgctgtcatttcagatgaagcggacacttccattttaaacctttcatcaatacagacagaatgcagtttggacacagtgacgtcagaacaatgctatgcagcgtttcgaaagattgggcttgactatggagagggctatcaagggattgaaaaagtctatgtcggcaaagatcaattgcttgcaaaaatctcgttacccgcttttctaaaaaacgacaagcagcattttgcgctccacccgagtttgatggattccgcgttccatgccacagtcggttttatcgttagctcagtcaatgccgctggacaagctcagacgctgtctcttccatttgcgttgcaggaggttgatattttcagcccatgtccagagaagatatggtcttatattcgatacagttcagacagtaaagcggaggacaaagtcagaaagtatgatattgatttatgtgatgagaacggacacgtttgtgtgcgaatgaagggtgcctcgatgcgggcacttgatggagagcggcattcaaggtctcaactagtaactgattctcagctgaccgggcatacgatgatgatccccgtctgggaaccagtctctctagaagcggaggataatgcttcgtttgctggtacacgagttgttttatgcggtgctgctgaagctgatcgggcattaataaagcatcattatccgcaagtatcctttatcgatatccggcctgcagatgacattgagggaatagcggacaaactgcaagcgtacggaagcattgaccatgttttgtggattgccccgtcacaccggggaagtataggtagtgatggacaagaagaagctgttcttcacttatttaagcttgtgaaagcatgcctgcaattaggctatggcgagaaacaacttgaatggtctcttgtgacaatccaagcgcagccggttacgcaacatgaggcagtacaacccgctcatgcaagcattcatggacttgccggcacaatggcaaaggaatatccacactggaaaatccgtcttctcgatcttgaaaaaggctgcacatggccggtaaatcacatgtttgcgctcccagctggccgccttggccatgcttgggcctatcgtaatcagcaatggcatcagcagcaattgatcccatatcggcactcactgtcaggcgacacgctatatcggaaaggcggagtctatgtggtcatcggaggagccgggtatatcggagaggcgtggagtgagtacatgatccgccgctaccaagcgcaaatcgtttggattgggcgaagtcaacttaatgctgccatccagtcaaaaatagaccgactttcggcgcttggccctgagcctttctacattgcagccgatgcagccgataagcattcattgcagcaggcttatgatcaagtgaaaatgcgccatcctcatattcacgggattgttcactctgcgatggttttatttgagcaaagcctggaaaaaatgaagccggaagaattcaccgctggactggcggcgaagatcgatgtcagtattcggatggcccaagtgttccgccaggagaatgtagattttgttttattcttctcttcgcttgtagcccatatcaaaaatgtgaagcaaagccattatgcctctggctgtacatttgcagatgcttttgctcaccggctttctcagagctgggcatgccctgtaaaagtcatgaactggggatattgggggaatagtgaagcggctgaggatgaacattatgtacagctcatgaatcaaatcggcttaggtttaattgagcctgcggaagctatgaaggcgctggaagccctgctttctgggccagtcagccaaacagctttcattcatacgacaaagcctgtagcagtcgaaggcgtgaatcagaatgaattcatcgctctttatccagagcaaccttcagcagatgcagagagcctgatggagcgtctgccgactacggcacgatttcaaagagtgacacatgaagagcttgatgatcttctttacaggctgttgttaggacagcttcaaacagccgggctgtttgatggttatacattatcggttgaacgtcttcaacaatataagactcgtgaattttatggaaaatggattcggcaaagcagcgaatttctcttgcagcatggctatcttaagaaagttggagattcattggtgaggaaggaccaagcagaggatatcgagctgctttggcaagaatggaatgcgaaaaaagaaaagtggcttaaagacagcgagacaaaggcgatggttgtattagcagaggccatgctgaaagcattaccggatattttgacagggaaagtccctgcaacagatatcatgttcccgcattcctcgatggaactggtggaaggcatttataagcataacaaagtggcagattattttaataaagtgcttgccgatacattattagcttatctggatgaacgtctgaagcacgaccctgaggcatcgattcgcattatggaaataggcgcaggcacaggcggcacgagtgccggaatctttgaaaaactgaaaccatatcaaaagcatatcaaagaatattgctatacagatctgtctaaagcatttttgctgcatgcagaaaaggaatatggggcggaaaatccgtacctgacatatcagctttttgatgtggaaaaaccgattgatcagcaggaatttgaagcgggaggctatgatgtcgtcattgccgctaatgtccttcacgcaacaaaaaatatccgtcaaacactgcggcatacaaaagcggtaatgaaaaacaacggaatgctgctgctgaatgaaatggcgggaaacagcctgttccctcacatcacctttggtcttttggaaggctggtggctgtatgaagatcctgcagtgcggattcccggctgtccaggcttacatcctgacagctggaaagcggcacttgaaagcgaaggctttgaatctgtctttttcccggccgaggcggcacatgatctgagtcaccaaatcgttgcagcctcaagcaacgggctggttcgccgtatgatgaaaaatgtgatcttgccggagaaggttgtttcacaagcgtctaatcaggagccagcctacattcataccatagattcagaggaagctggacaatcaaaacatgctctcctaagagaaaaaagcacagaatatatgaaaaaactaatcggggaaacgttgaaaattcctgcaggaaagattgagtcatctgaaccgcttgaaaagtacgggattgattctatcgttgttgtccaactgacaaatacattgcgtaaagaatttgaccatgtaagcagcactttatttttcgagtaccagaccattgacgcattagttgatcatttcatcaaaacaaaaacagaagcgctgatgaaattaacaggtcttgaccgtcaagttcaacaacagacaccggccgaaagcagaacccaatcctcacagaaacctgatcaggccgctaaaagaacacggcgctatcgcaagcttggcttcagcggggagaaagaaacaccgacaaacactcttgcaagccgtgacgttgccattatcggcatttctggacgctatcctcaggcggaaacagcagaagacttttggaacaacctaaaagaaggaagaaattgtattgaggaaattccgaaagatcgctgggattggaaagcttattacgataaagaaaaagaaggatcaatttatacgaaatggggcggatttatcaaggatatggacaagtttgacccattattctttcagatttctccgcttgaggcagaaagaatggaccctcaggagcgattatttctgcaaaccgcttatgcaagtattgaagatgcgggatacacgcctgactcgctctgttcaagcagaaaaatcggcgtctttgccggagtcatgaacaaaaattatccgaccggctacggctattggtctatcgccaacagaatatcctatttactgaatttccaaggcccgagtcttgcagtcgatacagcctgctcatcctccctgacagcgattcatttagcgctggaaagcatctatagcggatcgagtgattgtgccattgccggcggtgtcaatttagttgtcgacccggttcactatcagaatttatctgtcatgaatatgctctctgctagtgatacatgtaaatcattcggcgatgatgcagatggatttgtcgacggtgaaggcgtaggcgccattgtgttaaagccgctgcagcaagcaatagcggacggtgaccatatttacggtgtgataaaggcaagtgccattaatagcggaggaaaaacaaatggatacacggttccaaatcctcatgcacaggcacaggtaattaaagaagcaatggagcgcgccgacattcctgcccgaaccatcagttatttagaggcgcatggaacaggcactgcattaggagatccgattgagatagcggggttaacaaaagcatttgagaaagatacgcaagagaaacagttttgtgcgatcggctccagcaaatcaaatatcggtcattgtgaaagtgcagccggaattgcagggctgacaaaaatactttttcagtttaaatatggccaaattgcgccatcattgcatgctcagcggttgaatccgaacatcgagttcagccatacgccatttgtcgttcagcagcaacttggtgaatggaaacgcccggtgattggcgggcaagaggtgcctaggcgcgctggcttgagcagttttggcgccggagggtccaatgcccatatcatcctggaagaatatattccaagaacgggggcgcaaacgccgaaagaccatcctccagcgctgattgtgctgtcggccaaaaacatggaacgcttgcaagaaaaagcggaacagctgcttacagccatcaaacaaaaaaggtaccgcgaaacagacctgatcaggatcgcctataccttgcaaacaggccgtgaagcaatggaagaacggctggcctttatagcggaatcactagaggatcttgagagaaagctgaacgattttatcgaaaacaaagcagacagcctgtatctggatcgcatcgaggataacaaaaaagcgttagcagttttatcagcggatgaggatacggaaaaaatcatagaagcatggatgagcaaagggaaatacacgaaactactggatctttgggtgaaaggcttgtctttcgactggggcatgctgtacggcacccaaacgcctgtccggatcagtcttccggcatatccatttgcaaaagaacgttactgggcaccaggcgcggcaaaggctccggcgtctatagaacaggatcatgatcagcaaacagaagaacctttcaaggttatgacttttcaagaagtgtggaaagaagagccggcgactctcacatcgaaacgtatcaaaacgctcatctgttttctgactgaaagagaaaagcaaaacgcatttgcttcagccctgaaaaacgttgatcaagacaccaaggtcatttttatatcacagggcgaagtgtacagcaaacagtctgaatatagctaccagattgtgcggcaagaacccgttacttttgaaaaggccttccagagcattaaagaagaacttggagagccagatgcaatcctctatatgtggcctatggaagacaagcgctgtataaaggaccattcctgtattgtttacctattacaaggtatgtccgcagcaaagcttcatccttcacggctgctgctggcaggatgttttgaagatggtcttgaccgaagttatctggaatcatggattggcttcgaacgttcactcgggcttgtcctcccgcacacaaaagtgactggaatctttcagccggtggaacaaggatcgatggatgattggacacgtaaaatatggggagaattacaggcttcagctgaacaaacggttttgtatcagaatctgaaacgatatgtaaatcacattgaacagacaacgatacaaccggacgacagcaaattgaagtctggcggtacttacctgattacaggcggtgtaggagggcttggttatttatttgccaagcatttggccaaaaactatgccgcaaacctgattttgacagggcggtcgccttttaatgatgaaaagcaaaagcaaataaaagaattaaaggatctaggcggcgaagcgatgtatgcagaagcagatgtgtctgatcctatcgcaatgggagactgcgtaaaaagagggaaagaccgattcggtgccatcaacggtgtcattcatgcagccggaatcgagagcgactctgctatttttgacaaaaagatcgaaagctttcagcgcatcattgaaccgaaaatcaacggcacgatagcgcttgatgaatggcttaaaaatgaagaccttgattttatgtgttatttttcttcttcttctgcggttttaggggattttggatgttgtgattatgcgattggcaataggtttcagatggcttacgcacaatacagaaatgagctgcataacggtaaaacgtttgtcatcaactggcctgtatggaaggatggcggaatgaagatcggtgatgaggaaacaacggatatgtacctgaaatcaagcggccaacgcttcctagaagccgaggaaggcatccgtatgtttgagcacatcctagctcagcaggatgctcagcatctcgtgatagccggtcagcccagccgtgtcagcagatttttaggaatgactgaaccagctattccagaaccggccactcaagcccctctagcacaagaaaacaaggatgaggtaaaaacgttaagcattgaaaagcgtttagaacacgacttgaaagagcatattcacacattgcttaagatttcaaaggacaagctgaatttgaacaaaaattgggccgacttcggatttgattcaatctatttggctaaattctcgaatgtgttatcaaagcatttcaacatcgaagtgacaccggctttatttttcggctattcgactttacaagaattgatcggctttttcttaaccgatcataaagagctgattgaagcattttaccgggatgatgcatcagaggcgcaaaagccccctgaagcttatgcagcaattcctgtagctccagaaccggaaaccagtaaacaaagcattcggcaggttcacgatgagcctattgccattatcggcatgagcggcaggttccctcaagctgattcggtccatgagctgtgggataatctgaaaaaaggtaaatcgtgtatctctgacatcccgggcgaacgccgggactgggggagagctaacagagatccagaaaaagcagtgccaaggtggggggcatttttgaagggcatagaccggtttgatccgctgttttttcaaatatcgcctaaagaagccgaaagcatggacccgcgccagcgcatttttctagaggaagcatggcacacgtttgaagacgccggctatatgggagatcggataaaaggaaaatcctgcggtgtttatgtaggtgtggaagaaggggaatatgcgcatctaaccggagatacggattacattaacggaacacaaaacgccacattgtctgcgagaatcgcatacgcattggatttaaaagggcctaatatggctttgacagcagcatgttcatctggactggtagcgattcaccaggcatgttcagctctgcgtcagggggattgtgaaatggctttagccggcggcgtcagcttgaatatttctcacatgtcttttgaggcgctgacaagggccgaaatgctgtctccgaacggacaatgcaaagtgtttgaccaggatgccaatggtcttgtgccaggtgaagcggtggctgctgttctcttgaaaccattatcaaaggcaattgaagataaagatcatatttatggctgcatcaaggccagcggcgtgaattacgatggcaaaaccaacggcattactgcgccaaatccttttagccaggcagaattgatcgaaaacatttatgaaaaaaatgaaatcaatccgctcgatattcaatatgtgatggcgcacagtaccggctcgaatcttggtgatccgcttgaggtccaagcgttaacgagcgtgttcagcaaatatacgaagcagaagcaattctgtatgatcagctcaattaagcctttaatcggacatacatttgcagcgtcaggaacggttgctttaatcagtatgctgatggctatgaaaaaccagatgattccggccactcatcactgtgaatcggaaaaccagtatattccgtttaaagaaagcccatttgtgctttgcaaagaaaaccgttcgtggatcaggaaatatcagaagccgaggatgggaacgatcagcacgactggaatcagcggcaccaatgcacatgcagtcattgaagaatacattccggaagatcagccgcccacacagcggcatcaagggtcaccgcaggtcatcgtgctttcagcccaaaatgacgatcggcttcaggatgctgcctgccgcatgattgcgtatctggagcagaatcataacctttctttacctgatatggcatatacgcttcaggttgggagaaaagccatggaagcaaggctcgcgatcgttgcaaacaatcagaagcaattggtgcaaaaattgaaggaatatgtggaagcaatgaagaatggtggggtatcaggccaacagagatccctttatacaggatatacagaagggattttagaagaacaagatgaagcagttctgcaagctctcgcaaaagaaagaaatttggaaaacatcgcggattgctgggtgaaaggatatcagattccttgggaactccttcatgatggcgatcacgttcgaatggtttctttacctggttatccatttgcaagggagcggtattgggtttcgtcaggcacccagcaatcagtggccgttaaacagcattcacaagatatgaaaacagagattgacgagccgaatggcaaaaaccatattcaaaagatcattgttcaatttttagcacgagaattgggcatatctgaggatcgaatcaatttcaaaagaaactttttggattatgggatggattcaattcttggccgaaaattgatgcggcatatcgaaaaaaccacgcagctgaagatggccggtcgggaaatccttgaatgtcagacagtccaagctctatctgaccatttggccttaaaagcggaaaaacaaaatcatagcgcagcagcacatcaaataaaggacacgtatacagacgggcaaatcatcggattaatgcaagaggtggcgctagggaaattggattttaagagtgtgcaaaacatcatagaagggagtaaatcgtatgaatcataaagaaattctcgatgccttcagatcaggagaattaaccatttctgaggtggaagaacatcttaaaggcatgaagcggcagttgaaaagcccgctttctgaagggcaaaaagggctgtggatgcttcaaaaaatgtctcctgggatgagtgcatatcatattcctttatgctttcgcttcagcaaaccaatacatgcagagacgttcaagaaagcccttctgtttgtacagagacaatatccgatcttagccagtgtgattcaagaagaaaatggcattccatttcaatcggttcagttatcaaaggatctttattttgtggaagaggatatatcagcaatgaaatcagcagatatctttccttttctaaaagaaaaagcaaaagaacctttccagttggaagctggtccgttatggcgcacacacctttttcatcggttagaagaatgcattgttcttataacaattcaccatatcatatttgatggtgtgtcgatgctgacattgatatcggcgctattcgaagcgtatcaacaattgctgaatgggattgagcccttgcagcagccattaacagctgattattacgattttgtcgattgggaaaaacggatgctgactggcagagaaggggaagagcatctcgcttactggaaagaacagttgtctgggagtctgccagttcttgatttgcctgctgaccgtccgcggtcttcatcacgaaaattcaaggggcaagcttataaaagcttgctcccccatcacctgagcaatcaaattaaatcgtttgcccgcaccaatcatgtgaatgaatcggttgtgtttctctccatttacaaagtgttgctgcatcattatacaaaacaaaaggatatcattgttggcgttccgacaatgggtcggcaagatgacagatttgaaaccctaatcggttattttatcaatatgatggctgttcggagcaagaatatcggatctcagccattaacagcatttattcgggaactgcagctgacagtggctgacggcctggatcatgcggcgtttccgttccctgcattggtaagagagctgaatgtagaccgatcggccgcggattctccggtttttcaaacagcttttctgtaccaaaacttttttcaggcaacaggcttgcaaaaagtgctcgaaccgtatcaaacgcttggcatcgaatatattgaagacattcggcaagagggtgaatttgagctggcgctcgaaatatatgagcaagaaaatgaaacagtgcttcatcttctgtacaaccctgatttgtatgaactgtcctccattgaaaacatgatggagaactatatgaagctcgcgcaacacatgatggatgacccgtctttgccgcttgaagcctactctttgcgattaaatcaagaacaaactaatttggtggaacaatggaatgcgacagggacaaacatcgcaaatgacaagtgtatacatgaggtgtttgaggaaaaagcgaaacaaacccccgatgcggttgctgtgatgtttgaagacagatcacttacatataaagaagtagatgaaaaaagcacatctgtggcagtctaccttcaacatcagggtgttagacctgaacagcccgttggcatttgtgcagagcgttcgtttgatatgatcatcggaattttaggaatactgaaagctggcggagcgtatgtgccgttagatccaagttttccgcaagaacgattagagtacatgctcaaagacagtcaggcatccattgtcctcacccaacctaacgttcatgataggatcagcggattaactggcagccatgtaaaagcgatcaatatcgagttagcttgccgaaacgattatacagaccagcaaagcagcggtttaaagcgggaagtaaaaccggaacacctcgcttatattatttatacatcgggaagcaccggagagcctaaaggggttatggtagagcatcggagcattatgaataccctgaattttcttgaatctcactatcctgtaacggctgaggatgcatatttattgaagacgaactatgtgtttgatgtatcgatctcagaattattcggatggtttattggagacggccgtcttgtgattcttccgcctaatggggagaaatcaccgcagctttgcatggattatattgaaacatataaagtgactcacattaattttgtgccggccatgctgcatgtttttttagaaatggcgaaagacaacaaacgattcacagaggatggtccgctgaagtatatgatggttgcaggtgaagccttccctaaagaattagtgaaaaaggcggtatcactctttacaaactgccgtgttgaaaatatatacggaccgacggaagcctccatttacgctgcgtatttcggatgcggaaaaggagatatcgcaagtcaccatacaccgattggaaagcctgtctccaacacgaaaatttatattgtggaccagcatttaaagcctgtcccgatcggaaagcctggtgagctatgcatcgctggagccggcttagcaagaggctactttaaaaagccggggcttacggctgaaaaatttattgataatccctttgaaccagggacgaagctatataaatcgggtgattcagcaaggtggcttcctgacggcaacatagaatacttgggacggattgacagccaagtcaaaatacgcggttttcgcgtcgagctgggcgcaatagaaacaaagctgagtgaatttccgggcattttagatcaggccgtagtggtgaagcagctggaaggccatcaacagctcgctgcttattatacagaggaaagcggacatgcctctgccaatccaaaagatttgcgccttcatctaaaatcgagtctgccggaatatatgataccttcacactttatccgcttagatgagcttccattatcgcccagcggaaaagtgaaccgtaaagaattagaaaaacgcgagatcgtgttcaacataaggaaaccaaatcacttgcaattaacggaaatagaggatcaggtgctgcgcatttgggaggaaacgctcaaggtcagcggatttgggccggatgacggatttttcgatgcgggcggcgattcgcttctggctgtagctgtggctgaacgaatcaaaaaagaattcgattgtgagtttcatgttactgagctgtttgagtattccacgatccgtgcaatcagtgaatacattttggagatggaaaactcagatctagccgggacacaaaatgaagatcattatgatatcaaaaaagatagaaaacacctagaacagaagattcctccttattttgacgacagtgttgcgattgtggggatatcttgccagttcccgggtgcgaaaaatcatcatgacttctggaaccacatcaaagaaggcaaagaaagcatacgattcttttctgaagaagagcttcgcgcaaatggagttcccgaagaattgatacagcatcctgactatgtgccggtgcaatctgtgatcgaaggaaaagacttattcgatcccggtttctttcaaatctcgccaaaagatgctgagtatatggaccctcagctccgcctcttattgctgcactcctggaaagcgattgaagatgcaggatatgtggctaaggagattccggcaacaagtgtatatatgtctgcaagcagcaattcatatagaacgttattgccgaaggagacaacagaaggacatgaatcaccggatggctatgtctcatgggttttagcccaaagcggaaccattcccacaatgatctcacataagctcggattaaaagggccaagctattttgttcattctaactgttcttcatcactagtcggtttatatcaggcatacaaaagcctgacatcgggcgaatcacaatatgcgcttgtcggaggcgcaacattgcacgcacaatcagcgatcggctacgtgcaccaaaacgggttgaatttttcaagcgacgggcatgtgaaggcgttcgatgcttcggcggacggaatggccggaggtgaaggcgtagcagtcatcctgctgaaaaaagctgtggatgccgtaaaagacggagaccatatttatgccattatgcgcggaataggcatcaataatgatggggcagagaaggcaggcttctatgcgcctagtgtaaaaggccaaacagaagtgatacagcatgtattggatacaaccaagatccatcctgaaacggtcagttatattgaagcacacggtacgggaacgaaattaggcgatcctattgaaatgtctgcgctaaataaagtgtacaagcaatacaccgacaaaacacaattttgcggaattggttcagtgaaaacgaatatcggccatttggatacagctgcggggttagccggatgcattaaagttgcgatgagtttataccataatgaacttgcaccgaccatcaattgtacggagccgaatccggatataaagtttgaaagctctcctttttatgttgtccgtgaacgaaaatcgttagagaaacacgcaggtgtccatcgggcggctctgagctcattcggccttggcggaactaacgcccatgcaatatttgagcaatatgaaaacatttctgatgcaggtaccgaaaacgaaggcaatcagccttacatcattcctatatcagcaaaaaatagtgaacggctccaagtatacgcgaaggaaatgctgtcctatatcagtcaagacgagcaaaggcatttctctttaagagatattgcatataccttccaagtcggccgtgaagcaatggataacaggatcgtttttatagtgaacgatctggaagagtggaaacatcagctggaagcttttgtgactggaaagccgctcgcagaaggctgtattcaaggagaaaaaacgagaatgacatccgctgaacagctgcttggaaatgctgaagcagatgatatggcttcatcgcggatatcaaaagaagaattgagaaagcttgccgagatgtgggcaaatggctttcacgttgaatggcgcaggctctatccaaatataaagccacgccgcatcagcttgccgacatacccttttgccgaagaacgatactggcctgaaagcagcaccggcgctatcacaacaattgaaccatctcgtttgcatcctttggtgcaccataatacatcggttctgtcagagcagcgtttcagctccattttcacaggacaagagtattttattgccgagcatatcattaaaggcatggcgattttgccggcggcggtcacgcttgaaatggcaagagccgctatagaacaaggaattggcggattggaggatcatgaaactggaatcaggctgaaaaatgtcgtgtgggttcgcccggttgtagcaggaagtgagccggttcaggtaaatatcggactttacgatgaagatggcggacatattgcttatcggatgtatggtgatccggaatacgctgatgcagaaccagttgtatataaccaaggtaaagcggaattgattcagttaaagcgagaaaaagcactggatctttctaagatcaagaaacaatgtgatcaaagcaaaatggatgctgcctcgttttatgaagggatgatcggcgccgattacggtccaggttacaagagtgtagaggccgtatataaaggcgacggccagctgcttgccaaattatcactgccagaatctgttgcacatacgttgggcgattatgttcttcatccaagtgtaatggacggggcgttacaggcggctgaatatttgcaaaatgtcgtcagagcggaactttcagacactgaagactttaaggcagcactgccatttgcactggaggaacttgaggtttttcgtcagtgcgtttctgacatgtgggtttatgttcaattcaactcgaaaaacaaaccgggagatttgatacagaaagtcgatattcacctatgtgatgagcatggcatgatctgtgtgcggctgaaaggattttcgacgagagtgatggaggcagatatacaaaccgaaccatcaaaaatcaacgctgaaactttattgcttcagcccgtttggcaagaacaaaaggctgctaacagcttagctgcaaaaaaatatgcagagcatctcgtattcctatgtgaatatgatcatgagacgagaaaacaaattgaagcagctatcgaggatgtccatgtatacagcctggaagcaaggccttcttcagtagatgggcgtttccattcttatacagaacaagtgtttaaaaaggtacaagagatcattcgtacgaaaccgaaagacggcattctcgttcagatcgtgacctctgccgagggagaacagcaattgttttcagggttgacaggactgctgaaaacagcttgtcaggaaaatgccaaactaaccggccaaatgattgaagtcagcagtgaagaaagtggagaaagcattgctggcaaactgttagaaaatcaaatgagcggcgattcatatgtcaaatatcaaaacgggacacggtatattgctgattggcgtgaaatcaaacaggcaaaaggagacggcagcaaaccgtggaaagacaatggcgtttatctcattacaggaggtgccggcggactaggtcatatttttgcaaaggaaattgcggaacaaacgaaaaatgcgacagtcattctggcgggccgctcacctcttagcgaaagcaaaagcaaaaagctgaaagagcttcatagcaagggggctgacatcacctaccggcaaacagatgttaccaataaaattgaagtctatcagctcattgacgacattcaaaaaagatatggccgtctgaacggtattcttcatagtgccggaatcatcaaggacagctacctggttaataaacaggcaaaagatctgcacgatgtactggcgcctaaagtaaaagggcttgtttatctagacgaagcgagtaaggatttgcctttagacttctttattctcttttcatctctttcaggaagtttagggagcattggtcagtctgactatgcggcagccaatgtatttatggatatgtatgcaggctatcgaaatcggcttgccgacctcagccagcggcatgggcagacgctttctgtaaactggcctttatggagagatggaggcatgcaggtcgatcaagaaactgagaaaaggcttgtgcaacttgccggtattgttcctatgagggcggaaaaaggaattcaggcattatatcaagcacttcattcagaggcaaaccaagtaatggtgatcgaaggcgatgtgcagaaaataaaacaaaacatgctggccaaaaacgcctcagcacctatggaaaagaaggaagcagaacacatgactgaacaaataaatagcattgatgcagacagtttgctggataaagtaaaggcgatgttaaagcgagagatcgccaagctgttaaaggtcaagcttgaaacgattgatgatcatgccgagatgacggtgtatggttttgattctatctccatgactgaattcaccaaccatatcaatcgcgcctatcagttagagctgacgccaaccgtattttttgaccacccgacgattcatgcgtttggcaagcatttgtcagaagaatatcaatcggtatttgcgaagacatttgctgtgcgcgctgtatcggctcagattcagcctgccgcgaaacaggaacaagccgtgcgtgccaaagctaaaagacgcagaaagcagcaagtcatgctgccaaacgccatacagagtgatgctgggcctgagccaattgccattgtgggcataagcgggattttccctatggcgaaagacgttgaggcgtactggaacatcttaaaagagggcaaagactgcatgacggaaatcccgaaagatcgctgggattggcgtgaatatgaaggtgatccggcgaaggaagtcaataaaacgaacgtgaaatggggcggttttattgacggtattgcagattttgatccattattctttggcatttccccgcgtgaagctgaacaaatggaacctcagcagcgcttactgctgacttacgcctggaaagcgatcgaagatgcaggatattcggcgaaaaggttgtcaggcacaaagaccggcgtcttcatcggaacgggaaatacaggatacagctctcttctatctaaagcgaactcggcaatagaaggatcagcggcagccaatacgagcccatcggtcggtccgaaccgggtcagttatttccttaatctgcacgggccgagcgaaccgattgatacagcgtgctcaagttcactagtggcgatccaccatgccatctcttcaattgaggaaggcacttgtgacatggcattagccggcggtgtaaatacgattatccttcctgaggtgtatatcagctttgataaggcgggagcactgagcaaagaaggaaaatgcaagacgttttcaaatcaagccgatggttttgcgcatggggaaggtgccggcatactgttcctgaaaaaattaaaagcggctgaagaagcgggagaccacatttacggagtcataaaaggcagtgcaatcaatcacggcggccgtgcagcctctttaacgactcccaatccgaaggcgcaggcagatgttattcagtcggcatatcaaaaagcgggaatcgatccgaaaaccgtgacctacattgaagcccacggaaccgggacggagcttggagacccggttgaaattaacggtttgaaatcagcttttaaagcattgggtgtaaatgaaggagacacatcagtcaatccttactgcggtttaggttctgtaaagacaaacattggccacttatcgctggcagccggtgcagcaggagttattaaaatattattgcagcttaagcataaaaccttagtgaaaagtctgcattgcgaaaacgtgaatccatacattcagctgaaaaacagtccgttctatatcgtacgggaaacggaagaatggaaagcgctgaaaaatgaacggggagaagagcttcctcgccgggcaggtgtcagttcatttggaatcggcggggtaaacgcccacgtgattatcgaggaatatattccggaagcatccgatgagaatataccatccatcacgccggaacatccgggtatcttcgttttatcggctaaaaataaagcgcggctaaaagaacatgcacagcagctggcagatgcgcttgataagcaatcatatagtgacgtaaatctcgcccgaatcgcttatacactgcaagccggacgggatgcgatggaagaacgtctcggggttatctccggttccattgaggatgtacagcaaaagttaaaagactttgcagcaggcaaaagcggtgtggaggatgtatttaaaggcaggattgataaaggcacactccaaatgctgacagaggacgaagagattcaagaagctgtcgagaaatggatggaacggggaaagtatgcaaaattgcttgaattatgggtaaaggggcttgatgtagactggacgaaattgtatggcgagaatctgccaaagcgcatcagcttgccgacgtatcctttcgcaaaagaccgttattggatctctgatcatattgaaaaaatcggcagcattgatgcaaatcaagcagcctcccgccttggcggagccgtgctgcatccattaatgcatcaaaacacatcgaatctctcggaacaaaggtttagctctatttatacgggagaagagtttttccttgctgatcatgttgtgaaaggccaacggattttgccgggagtggctcatcttgaattggcgcgggcagctgttgagcaggccgcagaggtagaaggtgtaccgtgcaccatgaagctaaagaatgcggtgtgggtgcggcctattgttgtagaggatcagccacagcaagtacacattaggcttttaccgggagaaaatggtgagatctcttatgaaatctatggtcattcagacgttactggcgaacagtcaattgtctacagtcaaggcagcgcggtattgaatcctgctgaaaatctgccggcggttgattttcaatctctgcgggagcagtgtcaggaaagccatttcagcgtaaacgaagtatacgacacctatcgaatgattggatttgaatatggtcctgcttatcgcggagtgaaaaaaatctatacagctgaacaatttgttttggcaaaattgtcattgcatccgtcagctgcagatacgctcagccaatacaaaatgcaccctgggctgatggattctgctttgcaggcgtcaagcattttgacaggcgccggggataaccagctgacactgccttttgctatccaggagcttgaaatcttcggagcatgctcgtcagaaatgtgggtatacgcaagatacagccaaggcagcaaggcaactgataaggtgcaaaagcgcgatattgatattttagatgagagcggcaacgtttgcgtacggatgaaaggattatctttcagagcagcggaaggcggctctggatcggcggaatctgatcaaacgctggcaaccctgatgtttgaagaaaaatgggtgcctaaggattttaaaaaagaaagtcctgagcctcattacgaacggcacattgtcatgctttgcgacatgaatggcctctcaaaagatcgcattgaatcaagattgacaggagcggaatgcatcgttttggagtcattccgcgaaggacttgcagagaggttccaagattatgccgaacaagcgcttgagacggtccagggtcttctcaaaagcagacctcagggcaatgttctgatccagctgcttacctctgcacaaagaaagcagtactcattctcagggctatcggcgctccttaaaaccgccggcctggagaataaaaaactaatcggccagacgattgaaatcgattcacatgaaaatgttgaaagtgtaatagaaaaactgaaagagaataaaaggcacacagaagatcagcacatcaaatatgaaaaaggcaaacggtacatcaatgatctggatgaaatgcaaatagatgatcgggaaataagcatgccgtggagagataaaggtgtatacctcatcacgggcggcgcaggaggacttgggtttatttttgcaaaagagattgctcgtcaagccgaacagcctgtactcattctgacaggcagatccgcgttgaatgcggatcagcaggcggagcttaacgaacttcagcaattaggggctcgcgcagaatacaggcaggttgacgtgacacaaacggaagcagcctccgagcttatcacaagcattacgtctgattacgaagacttgaatggtgtcattcacagcgctgggctgattaaagataactatcttatgagcaaaaccaatgaagagctgacacaagttctcgctcctaaggtgaaagggcttgtgaatgtggatgaggcaaccgagcatcttgcgttagatttctttatcctcttttcttcaatatcaagtgttgccggcagcgcgggacaggccgattatgcaatggctaatgcatttatggacagttatgctgcttatcggaatgcgcttgtaaccgccatgtacaggcacggacaaacgttgtcaatcaattggccgctctggaaagaaggcggcatgcgcgcgaataaagaaattgaaaacatgacgttgaaaaacacaggtgtgactccaatgcggaccgagaccggcattcaagcgctgtataaaggtttggcatttggcaaagatcaagtcatcgtcatggaaggattcaaagacatgatgagggaaaagctgactcaaaagccgtcttctgatgatgtaccaatgaaaacagtgcaagtacgggtgacatctgaagcaagaatggatcaagggaatatgtttgaccacattcaagaagttttaaagcaaacaatctctcaattgctcaaaatcaaacctgaagagattgacccggacatggagtttaatcaatatggatttgattcgattacgttaactgaattcgcaaatacactgaatgagaagtgcaagctggatcttacgcctacggtcttctttgagcacgcaactgtttatgcatttgcagggtatctgtcagaagaatatccaaatgcttttacagctcaaacgcctgccaaagctgaggtgctaatgcagcctgtcgaacagaatataaaaaatatgacgttttcgactgaaaaccgctttgtaaaaccttcggtaacaccaatgcaaaaggaagctgatcacaagcctgagcctattgcgattgttgggatgagcggcgttttcccaaaggcaaaagacgttgaggaatattggaagaacctgtcatcgggcgcagattgtattacagaggttccaaaagaccgctgggattggcaggagtattacggagaccctctgaaagaagcgaataaaacaaacgtcaaatggggcggttttattgatgaagttgctgactttgatccattgttcttcggcatatctccgctggaggctgagcagatggagcctcagcagcgcctgttgatgacctatgcgtggaaggcggtagaagaagcgggacactcagcgagaagcctggcaggaaccaaaacgggcatcttcattgggacaggaaacacagggtacagttcacttctgtcaaatgtagacatcgaaggctcagcggctgcgaatatgagtccttctgcaggaccgaatagagtcagttatttcctgaacattcatggaccgagtgaaccgatcgacactgcgtgctcaagctctttggtcgccattcatcatgcggtttgcgccattgaaaatggaaactgtgaaatggcgattgcgggaggggtcaacacggtcgtaactccgcaaggccatatcgcctatgataaggccggggcgctgagcaaagaaggaagatgcaaaacattttctgacaaagccgatggattcgcagtcagtgaaggtgccggcattctctttctaaaaaagctgacagcggctgaacgagacggtgatcatatttacggtgtcattaaaggaagtgcggtaaaccacggtggccgcgcaaattctctaacgactcctaatccgaaagctcaggcggatgtcgtaaaaacagcatatgaaaaagcgggaattgatccaagaaccgtaacttatattgaagcgcatgggactggaaccaagctgggcgatccagtagaaatcaacggcttaaaagcggcatttaaagagctgtatgaaaaaacgggggacccggctgttcatggcagccattgcggacttggatcagcgaaaacaaacatcggtcacttatcgcttgcggccggtgtggcgggtgtcattaaagtgttattgcagctcaagcataaaacgcttgtcaaaagtctgtacagtgaaactgttaatccatatatcagactggatgacagcccgttttatattgtgcaggaatcgagagagtggcaggcgcttcgggatgaagctggccgagagctgccgcgccgcgcaggcatcagttcgttcggaataggcggcgtcaatgcccacgtggtcattgaggaatatattccgaaagaaacaacccatcctgcaacagcaccagccgtgacagcacagcacccgggcatctttattttgtcggcaaaggatgaagatcgtctgaaagaccaagcccggcaattagcagactttatcagcaagcgatctatcactgctcgtgacctcactgatattgcttatacactccaagaggggcgtgatgcaatggaggagagattagggatcatcgctgtctcgactggggacttgctggaaaaactgaacctctttatagaagggggcaccaatgcgaagtacatgtacagaggcagagcagaaaaaggtatcgcacaaacattgagatcagatgacgaagtacagaaaacgctcaacaatagttgggagcctcacatatatgaaagactgcttgatttatgggtaaaaggcatggaaataggctggagtaaactgtatgacggcaaacagccgaaacgcatcagcctccctacctatccatttgcgaaagaacgctactggataacggatacgaaagaggaggcagccgcccatcaaacagctttaaaaacagtcgaatcagcagctttgcatccattgatacatgtcaacacatctgatttgtcagagcagcgtttcagctcggcctttacaggtgctgagttctttttcgccgatcataaggtgaagggaaaaccggttatgccgggcgtggcatatcttgagatggttcatgctgccgttacaagagcagtgagaagaaccgaagatcaacaatctgttattcacatcaaaaatgttgtgtgggtgcagccgattgtggcggatggccagcctgttcaagtggatatcagtctaaatccccagcaggacggcgagattgcttttaacgtctatacagaggctgcacacaatgatcgaaagatacattgtcaaggcagtgcttcaatccgtggggcaggagacattccagtccaggatatcagcgcgcttcaagaccaatgcagtttaagcacactctcacacgaccagtgttatgaattgtttaaggcgatcggcattgactacggacctggttttcaagggatagatcggctttacatcggccgcaatcaagccttggcagagctttctctgcctgctggtgtaactcacacactgaatgaattcgttcttcatccaagtatggccgactctgctttacaagcgtcgatcgggctaaagctgaattccggtgacgagcagctttctctgccttttgcgctgcaagagctagaaatattcagcccgtgtacaaataaaatgtgggtgtctgtgacatctcgtcctaatgaggacaaaatacagagactggatattgatttgtgtgatgaacaaggccgagtgtgtgtaagaatcaaggggattacctcaaggctgctggaagaaggcatacaaccgccagacgggccgacatcactaggaaactccaaagcaactcttaacggagcgcttcttatggcgccgatatgggatcgagtgcagctggagaagaggagcatttcgcctgctgatgagcgtgttgtcatcctcggaggggatgacaacagcagaaaagctgttcaaagggagtttccgtttgccaaggagctgtacattgagccgaacgcatcaattcatagaattacaggccagcttgaagcactcggatcgtttgaccacatcgtgtggatgtctccttctcgtgtgacagagtgcgaagtcggcgatgaaatgatagaagcccaagatcaaggcgtcattcaaatgtataggctcattaaggcaatgctttctttaggctatggacagaaggagataagctggacggtcgtgacggtgaacacacaatatgttgatcagcatgatattgtcgacccggtcgatgccggggtacacggcctgatcggttcaatgtcaaaagaatatccaaattggcagacaaagctgatcgatgttaaaaaatacgaagatctgccgttatctcaactcctttccttgcctgccgatcaagaagggaatacgtgggcctatcgaaacaagatttggcataagcttcgtctaattccagtacacaacaatcaaccggtgcacacgaagtataagcacggaggtgtttatgttgtcataggcggagctggcggtattggtgaggcgtggagtgaatatatgatcagaacatatcaggcgcagatcgtttggattggcagaaggaaaaaggatgcagccattcaaagcaagctggacagacttgcacgtctagggccagccccgtattacattcaagcagatgcggctaaccgagaggaattagaacgcgcgtatgaaacaatgaaacaaacgcatcatgaaatcaacggcatcatccattctgcgattgtcttacaagaccgaagcctgatgaatatgagtgaggaatgtttcagaaacgttcttgctgcaaaggttgatgtaagcgtgcgaatggcccaagttttccggcatgaaccactggattttgttttgtttttctcttccgtacaatcgtttgcaagagcttccggacaaagcaattacgctgcgggctgcagttttaaggatgcttttgcacagcggctgtctcaagtatggccttgtacagtagccgtgatgaattggagttattggggaagcattggtgttgtttcatcaccggattaccaaaagagaatggctcaggcaggcataggctcaattgaagcccctgaagcaatggaagctttggaattgctgctcgggggaccgctgaagcagctagtaatgatgaaaatggcaaacgaaacgaatgatgaagcggaacagacagaagaaacgattgaagtgtacccggaaactcacggctccgccatgcaaaagctgcgaagctatcacccgggtgacagcacaaagattcaacaactgttataggaggagaagcgccaatgctgaacacagaagacattctctgtaaaatgcttttcgcacaattacagtccatagggtttttcacagaaagtaaatcccagccggtattggagaatttctatggcagatggtttgaagaaagccaatcgattttagaacggcatcaatttctcaagcgaacggagaacggacatgttccaacacgctcaataggcaccatgagcgagctgtggaaagaatggaatgaacaaaaatctgacctgcttcaagacaataatatgaaagccatggtgacattggtggagacagcacttaaagccttgccggagattctgaccggcaaggcgtcagccaccgatatcctgtttccgaattcatctatggatttagtagaaggggtctataaaaacaatcaagtcgcagactattttaatgatgtgcttgcagatacgttaacagcctatctgcaagaacgtctgaagcaagagcctgaggcgaagattcgaatattagaaatcggagctgggaccggcgggacaagcgcggctgtttttcaaaaattgaaagcatggcagacacatataaaagaatattgttatacagatctgtctaaagcttttctaatgcatgcagaaaataagtatggtcctgacaatccatatttgacatataaacggtttaatgtcgaggagccggcgtctgaacagcatattgatgcgggaggctacgacgcggtcatcgcggcaaatgtgcttcatgccacaaaaaatatccggcagacattgcgaaatgcgaaagcagttttgaaaaagaacgggctgctccttttaaatgaaataagtaatcataatatatattcgcatttgacgttcggccttttagagggctggtggctgtatgaggaccctgatctccgcataccgggctgtccgggcctgtatccggatacttggaaaacggtgcttgagagtgaaggatttcgctatgtttcctttatggctgaacaatcgcatcagctcggccagcagatcattgccgctgaaagtaacggagtcgtccgtcaaaagaagagaacgggggcagaagaagatccaagccatatacaaatgaatgctgaaatcgctcattcacaggaaagcgattctctcatcgaacaaacggcacaatttgtgaagcatacgctggcaaaatcaatcaaactatcaccagaacgtattcacgaagatacgacatttgagaagtatggaattgattcaattttacaggtgaatttcattcgtgaattagaaaaagtgacgggagagcttccaaaaaccattttatttgaacataacaacacaaaagaactcgtcgaatatttagtaaaggggcatgaaaataagctccggacagcattgttaaaggaaaaaccgaagcctgcaaaaaatgaagctcctcttcaaacagagcgtacagatcctaataagccatttacttttcatacacgccgctttgttacagagcaggaagtcacggaaactcagctagcaaataccgaaccactaaaaaaagaaaagacaagtaatttgcaaggaacacattttaatgattctagtacagaagatatcgcaataatcggggtaagcgggcgctatccgatgtctaacagtttagaagagctttgggggcatttaatcgccggagacaattgtattacagaggcaccggaatccagatggcgcacatctttattgaaaacattatcaaaagatccaaaaaagccggcaaataagaaacgctatggcggatttttacaagatatagaggcatttgaccatcagctttttgaggtggaggaaaatcgggtgatggaaatgacaccggaactccgtttatgtttagaaaccgtctgggaaacgtttgaggacggcggctatacgcgaacccggctggataaattgcgggatgatgacggagtaggtgtttttatagggaatatgtataaccagtatttttggaatatcccatctttagagcaggcagtcctcagctcaaatgggggagactggcacattgcaaatcgcgtttcccacttttttaacctgaccggaccgagtatcgctgtcagctcagcatgctctagttcattaaacgccatacatcttgcgtgtgaaagcctgaaattgaaaaactgctcaatggcgattgctggaggcgtcaatttaacactcgatctctctaaatatgattctttggagcgtgccaatctgctgggaagcggcaatcaaagcaaaagttttggcacaggaaacgggcttattcccggggaaggcattggagctgtcctgttaaaaccactttcgaaggcgatggaagatcaggatcatatttacgctgtgatcaaaagcagttttgccaaccatagcggcggaagacagatgtatacagctccggacccgaagcagcaagcaaagttaattgtcaagtcgattcagcagtcgggcattgatccagagactatcggctatattgaatcggcggcaaatggttcggcgctgggcgatcctattgaagtaattgccttaacaaacgcgtttcaacaatatacaaacaagaaacagttttgtgcgataggctctgtcaaatccaatctggggcatttagaggcggcttccggcatttctcagctgacaaaagtgctgctgcagatgaagaaagggaccctggtgccgacaattaacgcgctgcctgtcaatccaaatattaagctggagcacacggctttctatcttcaggaacaaacaaagccatggcatcgcttgaatgatcctgaaactggaaaacaattgcctcgcagaagcatgatcaattccttcggagcggggggagcctatgccaatcttattatagaagaatatatggagacggcccctgagaaagaacatatcgctctccgccagcaggaattcactgccgttttttcagccaaaacaaaatggagcctgcttagctatctagaaaatatgcaattgtttttagagaaggaagcttctctggatattgaacccgttgtacaggctttacacaggagaaaccataatttagagcatagggctgcatttacagtgacatcaactcaagagctgatcgaaaaactaaaggtgttccgaacatcaagagaaagctcactccagcaaggcatctatacatcattcgatttacagccatgtccggaatcagcatctaaggatagagaaataaacgcagcagagcaatgggcacaaggggcatcgattgcttttaaagaagctgatatagggaaccgaacaggctgggttcatctgcctcactatgcatttgaccataatacatcatttcatttcgatgtatcgtctatcaatgagaaatcgtcagatgttgaagacaatatcaatcagccggtcattcaagagcaattcacttatgatgagccttacgttcaaggacacgtcttcaacaatgaacgggtgcttgtcggtgccacatatggcagtctggccattgaagcattttttaacctgttccctgaggaaaacagcggccgtatcagcaaattaagttatatcagtccaattgtcatcaaacaaggcgagaccattgaacttcaggcaaagccgctgcaaaaagatcaagtcatagaactgcaaatcatgtatcgcgagccgtcctctggtttgtggaagcctgccgcaatcggacaatgcggaatcggttcttttgagcccaaaaaagtcaatatcgagaacgttaagcattcattaactaagcttcatcacatcgatcagatgtataaaaccggaaacggtcctgaatggggagagttatttaagacaattactcatctctacagagatcacaagtctatactggcaaaaattcgcctgccccaaagcgggctggcaaacgggcaccattacactgtaagcccattgatgacaaacagcgcgtacttggctatcctcagtttcttagagcagtttgacatgacaggcggcttcctgccgtttggaatcaatgatatccagtttacaaagcaaacgataaaaggggattgctggcttttgattacattggttaagaatacaggtgacatgttgctgtttgatgtagatgtgatcaatgagtcgtcagaaacagtgctgcactactcgggctactcgcttaaacagcttcgtatttcgaatcaaagaggaaatgaaaataaggccatcaaagccagcgatctgaaagctcgtatcagaagctatgtaacagataaactggcagtaaacatggccgatccgtcaaaattgtctcttgcaaaagcgcatatcatggattttggaatcgattcttctcaattggttgcactgacaagggagatggaagcagagacaaagatcgaattaaatccgactctgttttttgagtatccgactattcaagagctaatcgacttttttgcggacaaacatgaagcatcttttgctcagctgtttggtgaagctcatcagcaggaagaacgcctagctcaaatcgaaaaccaaatgaaacagattccggcatacgagacgaacacggataaaacaatcgaacacgcggcagacggcatagccattatcggcatgtcgggacagtttccgaaagcaaacagtgtaacggaattttgggataaccttgtccaaggaaagaactgtgtctctgaagtgccgaaagaacgctgggactggcgcaaatatgccgcagccgataaggaagggcaatcaagccttcaatggggcggttttatagaaggaataggtgagtttgatcccctgttttttggcatatcgcctaaagaagcggcgaatatggacccacaggagtttctgctcttgatacatgcatggaaggcgatggaagatgcaggcttaacagggcaggttttatccagccgcccgacaggagtatttgtcgcagccggcaatacggatacagctgtggttccttccctaattccaaaccgtatatcctatgcacttgatgtaaaagggccaagtgaatattatgaagctgcctgttcctcagctctagtggctttgcacagagctatacaatccattcgaaacggcgaatgtgagcaagccattgtcggggctgtgaatttgctgctttcaccaaaaggctttattggcttcgactcaatgggctatttgagtgagaaaggacaggccaaatcctttcaagcagatgcaaatggctttgtcagaagtgaaggagcaggagttctcatcattaaaccattgcaaaaagccattgaagattctgatcatatttattcggttattaaaggttcaggtgtatcgcatggcggcaggggaatgtcacttcacgcgccaaatccggccggcatgaaggatgcaatgctgaaggcttatcaaggagcgcaaattgatcccaaaacggtgacctatatagaagcgcatgggatcgcctctccattggcagacgcgatagaaatagaggcgttaaagtcaggctgcagtcagctcgaattggaacttccacaggaagtacgggaggaagcgccatgttatatcagcagcttaaagccgagcatcggacacggtgaactcgtctcaggcatggctgctcttatgaaggtcagcatggcgatgaagcatcaaacaataccaggcatatccggattttcgtctttgaatgaccaggtgtcattaaagggcacccgtttccgagtgactgccgagaatcagcaatggagggatttaagtgacgatgcaggcaaaaaaattccgcgcagagcgagtatcaacagctatagctttggaggcgtaaatgcgcacgtcattttagaagaatatattcctttaccaaaaccaccggttagtatgagtgagaatggtgcccacattgtagttctttctgcaaagaatcaagacaggctaaaagcaattgttcaacagcagcttgactatctgaataaacaacaagaactgtcattacaagattatgcttatacactccaaaccggccgagaggaaatggaagaccgcctggcgctcgtcgtccgcagtaaagaagaactggtaatcggcttgcaagcctgcttagctgcggaaaaaggcgataagccgaagagttctgtacctgtctttagcggaaatgcagaaaatggctcgtcagatctcgaagccttgctggatggtccattaagagaaatggtgatcgagactttgttgtctgaaaacaaccttgaaaagatcgcgttttgctggacaaaaggggtgcaaatcccatgggagaagctttatcaaggaaaaggtgcccgcagaataccgttgccaacctatccatttgaaaagagaagctgctggaacggctttcaagcagtagagaatacgccttctgtttcacaggatgagcgtatcaacaacagcagcgatcatcacatattagcaaatgtactagggatggttccgggtgaactgcagcctcataagccattgcagcagtatggatttgattcaatttcttgcatacagttattacagcaattgcaatcaaaggtggaccctctcattgccttgacggagcttcaagcatgccatactgttcaggacatgatggacttgatcgcaaagaaaaaggaggatacatccttacaaaatgatcaagctcgcacgtttccggaattaataccgttaaatgacggcaagcgggggcgccctgtcttttggttccatggcggagtaggaggagttgaaatctatcagcaatttgcacaaaagagccagcgccctttttacggcattcaagccagaggattcatgactgattatgctcctttgcacggaattgaacaaatggcttcctattatatagagatcattcgatccatacagcctgaaggtccttatgatgtaggcggatattccttaggcgggatgattgcatatgaagtcacacgccagctgcaaagccaaggccttgctgtcaaaagcatggtgatgattgactccccatatcgttctgagacaaaagagaatgaggcatctatgaaaacgtcaatgctgcaaacaattaatacgatgctggcatcgattgcgaaacgggaaaagcttacggatgttctcatcagccgtgaagaggtggacataagcttagaggatgaagaattcctggctgagttgattgacttggcaaaagaacgagggctaaacaaaccagataagcaaatacgtgcgcaggctcagcaaatgatgaaaacacagcgcgcctatgatttggagtcgtacactgttaagcctctccctgatcctgagacggtaaaatgttattatttccgcaacaaaagcaggtctttctttggtgatttagacacttatttcactttatcaaatgaaaaagaaccgtttgatcaagctgcctattgggaggaatgggagcggcaaattcctcatttccacctggtggatgtcgattcaagcaaccacttcatgatattaaccgaaccgaaagcgtcaacagccatgttagaattttgcgaaaagctctattcaaacaggggagtagtgaatgcgaatttccttaaggctttccggaagaaacatgaagcgagggaagaaaaagaaacagatgaattggtgaagcgctgagaaaacacaaacgccccctcttttaaaagggggcgttttgaatgttattttgaaagtgaaacagggagactttctaatcctcttaaaaagacattttttctccattgaatgtcatcaggtgcaaccgcaagttcaatatcaggaaatctcttcaaaagtgcgttaaatgcaatgtggccttccagcctggcaagaggcgctcctaagcagaaatgaatgccaaaaccgaaagaaatatgtctgttaggcgaccggtttatatttaatatttcggggttctcaaaaaaattcgggtcgcgattggcagatccgatccctataaaaatcatgtctcctcttttgatcgaatgccccttatatgtaaagtcttcgatggcccaccgatttgccatcataacgacaggtgaggtgtatcgcagcaattcttcaaccgctgtagcgatcatttcaggctgctgcttgagcttctcacattccttcttgtgctgcagcaatgcgagggtgcctgagccgagtaagttaacagttgtttcaaggccggctacaacgagcaagaacagcatcgaatagagctctttttcgcttaacttgctgccgttttcctcagcatgcacaagtttgctgattaaatcgtcttttggctttattcttctgtcatggatcagcttggcgatataatctttaaattcacgaagagcctgatttgtcagctctctattaccttcagaggtatcaaccatcgcattggtccagatttgaaactgtgaccgatcttcttttgggattcccatcaattcagatataacaataaaaggcaaaggggaagcgaaggatttcatgatatccgctttattttctttttccatttcatctaaaagctgttcagcaatttgttcaatgctgccgcgcagattttcaatggttcggggagtaaatgcttgatgaacaagtgatctcaggcgggtatggtcaggtgtgtcttttgccagcatatgatcggatacaaaatcgatatcttcactaacgttgagcattttgatttgttcttggttcatcacattttttacgtctcttgtaattcgattgtcttttaaaaaggccatacaatcatcgtatcgggtaattaaccaggccggatatgtggctccgaaccgttttaattcaaatcggtgaatgggctcttcctctctaaatcgtcctaaaactgaaaaaggattgtgatgaaactctttaccatgcggatgaaacatcaatttttccatttgcattctcctcgcctaatagggtaaatagatgaatcaaattgctgaattagtttacaaaaaacagaatgatttgaaatgtaatcctgtctctaaaactatatatctatcttaggcgtcattcaatagggagaagaacgaaaaaagtgaaaaaacggctcgatataaagcagcgcctttgaacgaaagctcaaaggcgctacgctgtattattttgatgaaagtggctgtcagctgtgctggatatcaattgtatatactgcacgatctgttacgaccttcaatccttcgttttcttggtgaatatgaagctcacctaataaaggaatctcataggcattttgcggaagcggtacgtttccgtcctcagtgaatgttgttccttcgccttctaaaacaagctcttctttcgcaacataatcatcaggatgattcgtactgcgtatagccactttttgaaggtggagaacaatctgatccaagtctgatatctcttcatcatgggtcaattcaccttttctaatatcaagcgtctggccgacttttgattccagccattgagaaagctgtgtattcgtgtgtgccatcaatattcctccttttgatctacacgatactattcccaattgctgcatcttttacacgggaaagagccgccccactctttatgtatgaaacagttcgctgttgagtgccttgatatagcgtacggcagaacgctggaccgattcgtcggcattttctttgacaactttagagaaagcattgtaaagccggttgaattgaagcggttttactttggctgctatttcttcaactttggaggcgggaaggggaatgagatttgggtagctgtacataaagctgacccagtttcgatccgccgcaaccgtaatgatatctccggtcaatagacagcctttcccttcattgcccttgctccaatgcaaaacagcaccgcctttaaaatgtccgcccagtcggtaaaggtccagtcccggcttcatattgagcgtttcccctgaccagaagtgaatgtgattgcttggccttgtcacccattctttatcatcctcatggatatagatcggcgcctgaaacgcttcagcccactcaacctgagtagagtaataatgtggatgagacaaggcgatggcttgaataccgcctaattcgttgatttggtcaattgtcttttggtcaagatatgtcatgcaatcccacagcacattgaagcccttatgctggataagatgggctgtttgtccgatcgcaaactctggttcagttttgatgctgtaaagatgctcttcttcctttttaaggatgttttgaaggtttcctttctcacgcatgtcttcaagggttgtccaagtttgtccatcgggatgaatatactgtctttcatcctcgcaaatcagacacgagttgggcggatctactgtctgtgcatgttgcacaccgcatgtgttgcagatataataaggcactttcttcacttccttcatctattttccattattttaccttatgattatgaatattcaaacaaaaggccggcagttctgctgagagagaattgccggcttttgatgatgtttattggccgggaacggaattttctgcgttgacagcgcccgctccgtagatattcggatcttcatctttccatttgtccgtgccgtttttcaaaagctcttttacttcatcaggggtaagatccgggttttgctgaagaattaaagctgcgattcctgcgcaaatcggtgttgccatcgaggttcctgacattgtaaagtactgagaccctacacggcttgacttttggagcttatcaatataagaattcggagagcgaagggaaataatattaacacccggcgctaaaatatcaggcttttctttcccatatactgtcgggccgcggcttgagaaggaagcgacagtatcatcatcgctgcttgcagtattgttatcgtcaagcgcacctactgtaatcaccttttcgctcacgcccgggcttgcaatggtctgcgaatcagggcctgagtttccggcagcgacacagacgacaatccctgcgctccacgcttcctcaaccgctctgactaacggatcttcctgttcatgatcatatctaagggcatcgcccccgagcgacatgctaataatatcaatcggttcatcggggttgtcctcattgtattgaatacaccactcaacaccctctataatatctgctaacgttcctgaaccctgcttgtttaatacctttacgccaatgagattggcttccggtgcagggccgcggtattgaccggaagaggatgcgccgctgcttgcgacatcacctgcacagtgtgtgccatgaccattatcatcgtacggctctgttttttgattgaccatgtccgcgaatccgataattctgccttctagatcaggatgcgggtagattcctgtatcgacaacagcgacagtaacaccttttcctgtcagggtttgaccgtttctgacgacttccttcgcatggcttgcttcggttgccgtgtctaaaagcgctttgacttcgcggtttaaatacactttacggatattgctgcattcagagagaagggaatgtaatgctgaaggagtaacttcggcgctgcagcagttgattttgttgaagcggctttttagcttgctgcgtttttctttttgcagcacctctccagctatttgaaggccggtctcgtgacagccttcctcaaattcgataatgactgacattttttttctgttttgcaatttggtttcgaaaaatttatgcaagaagcaaggagtccatttgaagggcttgtaaagctgcaatacggtttcccgtaacggccaatctagcttgtgagcatttgctctcaccatttgtaccatagagtacccaaacatgtattttcctcctattataaggttctctgtatactctatgaacagatgataggtttggtaagtttgtttgtcctctgtaagagacagacaagagtttgtttttctgaatctttcgcattagatacgatagattcagaagctgaggaaatcattggggattgaaaaagaacgtttgttcgtattataatgtgatcatatcaaactgggaaggggagagcaaccgtatgaatttctacttgcaccgatctttggaaagccaaatgccaatcagcattatatatatgaagaaagacggaacgattagtaaaagaacgattattgtgagacagaaaagcaaaacgaaaatcaaagcattttgtttttcgaaacaacaaatcagaacatttttattggactctatcctctcctgtgactttgtgagaacaaataagcaaaatctctattctgcaggccggtaacagctgtccgtctcagcaaccgggcagcctgttactaaaaccctccttaaacctatatacatttatttgccaagtgaggttgttcctaccttttttgtctttcctctcaaccttttttcactcttatttgaaatgaaccgctaataaccgtgacaatcaattgattttttgaaaccgggaactttttcactgatgatattgtgtatacaatggtaagataaaacctattggctaaacctcatataatgaaccgcgccattcttatgaaaggagttaaacatgagaagatttttactaaatgtcatattagtcttagccattgtcttgttcttgagatatgttcattactcattggaaccagaaccatcaaatcagccagatacatattcaaatttcagcagcttggcagagaatgagagcccagccgattacgatatttcatataatgagaaaaaaggaagcaaagtcttaattatgtctccgcatggcggaagaattgaaggcggagtaagtgagcttgtgcgttatttcaataatgaatactctacatacctatttgaagggttgaagtcccatgataaccaaacactgcacattacaagcaccaactttgatgagccattggcaaaaaagaaaatcaaggagcatcaatatgtggtggcttttcacggatataaaggagagaacaagaatacccttgtagggggaacagaccgaaagcgggcgaaaatgattgtgagagcccttgagcggagagggttttccgctgagttagcgtcgtctaaaagcggtcttgctggattgaatgccgaaaacattaataaccaaggggaaacggggctaagtatccagctggaaatcagccgtgagcagagagaagcattttttgatgatttttattataaaaatagaaaatacacaaagaacagtgaattttatgcttatgtcagtgcgatcaaaggtgtcctggaaaaagagtattcgtaacaagcagatcagaagacaaaataagagaagatcagtagactgaaataggataaaaaaggaggcaaaacaatggcagatcatcatttttatttaaaagcgaactggccgggtaaccgtaatgatgtcggtacgatcgaaagcggaaacctgatcacatcgatttccattcctaaagaaatggatggcccgggagaagggaccaacccagatgaaatgcttctcggggcggcagcgacctgttacattattacacttgcagcgatgatggagagaagcgggctggaaaaagaagacttacagatggagtcagaaggcattgtcaacgttacaaaaggagtctttacatacaaaaagatcattcaccgtccctctgtcgtgcttaaacatgatgcttcacaagacgacgtcgcattggcgcacaaactttgtaaaaaagcggagtcgtcatgcatgatttcgcgtgcaattcaaggaaatgtcgagctgcagcttgaagcctctgtgaaactgggttgagaataaagaaaacagacggtcactcacaggccgtctgttttttatcttcagcgtgggctttcgattgatttagcacgaccacgcctgcaatgacaagcgtgagaccgaatacaccttttaaactgatggtttcgccaaaaagcaaaaacccgacaattgctgtaagcgcggtaccaacgcccgaccatgttgcatacgcgcttgataagtcaattgtttttaaagaaaagcttagaaacgtaaaagcagaaagaaatccgactatgactccggcaatgggccaggcttgtgtaaatccttctgaaagcttcaacatcgtgctcccaaacacttcagatacaatggcgagagccaaataaagcaatcctctcatcttcatcactcctttacggccaattaagtaacacgacccctgatagtaataaaagaatcccgataagccctttggcattcagatcttccttgaaccattttactccgatcactgtcgtcagcaccgtgcctgccccgctccaagtcgcataggagaggctcaggggaatatggtttaaagtcagggacagcatataaaaggcgagggaatagccaataacgaccaaagcacttggcttccactttttgaagccatcagatactttcagcatggctgctcctatcgattccgaacatatggcaatcgtgaggaatatatatcctatcaacatcatgaattctcctcactatatttttagattagaaaaaaacttcagctagaaaaatattagtgtatgcctatgtatgagtcaagagattcattttcacacacttaaaaagacccctttttaaggggccttttgcgtttaataataataagggaacggggcatacggataataggggtatccgccatacaaataaggattaaataaagcgcttcctataagcccgcctgcaaggccgccgataaacggtcctccaaaaaatccgaatggccggccaaacccataaccaaatccgggtcttccaaatccgtaaccgaacccgaacggtcttccaaacccaaatggtctcccgaatccgaacggtcttccaaatattcttgtatcttcagggctgaaatgctctaactcgttcatgttttctttcctcctgtaataaagtgtagatgatgcagtgtattcaccctgcccggatttgattgggcgaatcgaggaaaaggaggatgtgaacacattgggcctgtatcagtctgactggtcaaaagcaccgccccacgcacatgcctatcatgtcaaaacaacgagagaacagggccattatcatctcattgaagggtttactcagccggcaaacggatcaaataccgatcagcatacacattactatacagggatcacttcatttgaaaacggccattttcatcggtattacggaatctcagggccggcgattcccttagcagatggcacacattatcatgaaatcgaagaaacgacatatctggcctataacgagccaattgagatccagtacggaggggttgtgtacgatcccggagatgacagaagaaaaacgcatcgtcataccctgaaaggaaagacaagggaaattgtcggcaatgagccgctcggctggtagaaggatgtttaccgatgcaaaaaaagggcaaaatggataggtggttgtccatgttgaatgctataatgggggggagatttataaaagagagtgatacatattgaataatacgaagcagcccgttgtcattttagtcggaccgacggcagtggggaaaaccaatttaagtattcaactagccaaatccttaaacgcggaaattatcagcggagattcgatgcagatttataaagggatggatattggaacagctaaaattaccgaacaggagatggagggagtgccccatcatctgattgacattttagatcccaaagactctttctctactgccgattatcaaagcttagtaagaaataaaatcagcgagattgcaaatagaggaaagcttccgatgattgtcggcggtacagggctttatatacaatctgtgctttacgattatacatttacggaagaggcaaatgatcccgtgtttcgagagagcatgcaaatggccgctgagcgggaaggcgctgactttctgcatgccaaacttgctgcagcagatcccgaggcagcagctgcgattcatccgaataatacaagaagagtcattcgcgcactggaaattttacatacgtccggaaaaacgatgtcccagcatttgaaggaacaaaaacgagaacttctgtacaatgcagtgttaattggcttgacaatggatagagacacgctttacgaaagaattaatcagcgggtcgatttgatgatggagtcaggccttcttccggaagtgaaacgcttatacgacaagaacgtgagagactgtcaatcaatacaggcgataggctataaagagctgtatgcatattttgacggttttgtgacactttccgatgctgtcgaacagctaaagcagaactcgaggcggtatgcgaaacgccagctgacgtggtttcgcaacaaaatgcaggtcacatggttcgatatgacaccgcctgttgatatggagctgaaaaaaaaggaaattttcacacatatagcaggaaaactcgaactttaatcgaaactgtatgatatagagaatcaaggaggacgaaacatgaaaccgattaatattcaggatcagtttttgaatcaaatccggaaagaaaatacgtatgtcactgtttttttgctgaacggctttcagttgcggggccaggtgaaaggctttgataactttaccgtattgttggaatcggaaggtaagcagcagcttatatataaacatgcgatctcaacgtttgcgccgcaaaaaaacgtccagcttgaactcgaatagatcaaaaaatgccatgtcaagacatgaggaaaggctgccgggggttcccggcggccatttttaacatgaatccacttttgctccaagctttttgtgtaagctgaccatgccaaggcacggtctttttttatgagaacaacatacggaagtgaaaatggtatattatgtataaaatgaatttgggagtgatcgaccttgtttgaaagtgaagcagaactgagacgaatcaggattgcacttgtatggatagctgtctttttactgttcggggcgtgcgggaatcaagataccattattgaaacagacagcggcaattcagactatgaaacgcctcagcccacctcgtttccacttgaacataaccattttggcgttatggaggacggctatatcaaaatttatgagtataatgagtcccgcaatgaggtaaagctgaagaaagaatacgcggatgatgagcttgaataaaattcacaagcattcgaatttacaaagcggattccagccgctaaactaaatacagacacagatcaaacagagggtgaaaacatgaagcataaagtgatcgtgaatcattgggaagaaatttgcgaagatgattcttgctatgaatacggaacaagtatcattgtgaacggaaaagaattaatcagagaagcgtcaattatcactgctttgaaggcggttttagaagagatcggcgcggatgttgaaatagaagaaacagtagagagcgaaaaatgctgtgatagcttaagaaaaaaaaatctagactactaagcagttttttttcatgttatgataaacatcggctaaaaaacgacaccccgagtaggatgagagatgattctcgttctgctctcttttttgggccctaatgagtctgcccatttgcctgatttgatcaaaatatgaatttttcataaaaacgaatctatatattgtgtttttgctagagggtagtatactgtatatagtgttagtgatgagagattcatattttttgataggtcgtgataaaacgtggtacaaatcatatttgattcgaaaacagggaatgttcagcggtttgtgaataaaacaggctttcagcagatacgcaaggtggacgaaatggaccacgtggacactccgtttgttttggtcacctacacgacaaacttcggccaggtaccggcatcaacacaatcatttctcgaaaaatacgcccatctcttattaggagtcgctgcgagcggcaacaaagtatggggcgataactttgcaaaaagcgccgataccatttcaagacaatatcaggtgccgatcttgcacaaatttgaactcagcggcacatctaaagacgttgaattgtttactcaggaggtagaaagagttgtcacaaaatcaagtgccaaaatggatccagttaaataacgaaatcatgatccaaaaagatggaaaattccagtttgataaggataaagaggctgtacatagctattttgtagattatatcaatcaaaacacagtcttctttcacgatttaaaagagaagctggattatttggttgaaaaccaatactacgaagaggaattcttaagcctttattcttttgaagacattaaagaagtgtttaagacagcttacgctaagaagtttcgttttccttccttcatgagtgcgtttaaattctataatgactatgctttgaaaacgaatgacaagaaaaaaatcctcgagcgttatgaggaccggatctcaattgttgcgctgttcttcgctaacggcgacactgagaaagcaaaagaatatgtaaacctgatgatcaatcaagaatatcagccgagcacaccgacatttctgaacgccggcagaaaacgccgcggtgaacttgtgagctgcttcttgctggaagtcaatgattccttaaatgacatttcaagagcgatcgatatctccatgcagctttctaagcttggcggcggggtttctcttaacctgtccaagcttcgcgcgaaaggtgaagccattaaagatgttgaaaatgctacaaaaggcgttgtaggcgtcatgaagcttcttgataacgcgttccgttatgctgaccaaatgggacaaagacaaggctctggcgcggcgtacttaaatattttccaccgcgatatcaatgattttctcgatacgaaaaagatttcagcggatgaagatgtgcgcgtcaaaacgctttcgatcggtgttgtcattccggataagttcgttgagcttgcacgcgaggacaaagcggcttatgtattctatccgcacacgatttataaagagtacggccagcacatggatgagatggacatgaacgaaatgtacgacaaatttgtcgacaaccctcgggtgaaaaaggaaaaaatcaacccgcggaaattgcttgaaaaactggcgatgcttcgttctgaatcaggctatccatacatcatgttccaagataacgtgaataaagtgcatgcgaataaccatatttccaaggtgaaattttctaacctttgctctgaagtgctgcaggcatctcaagtttcttcatacacagactatgatgaagaagatgaaatcggtctggatatttcctgcaacctgggttcgcttaacattctcaatgtcatggagcataaatcaatcgaaaagacagtcaagcttgcgacagactctttaacacacgtgtctgaaacaactgacatccgtaatgcgcctgctgtaagacgggcaaacaaagcgatgaaatcaatcggcctcggtgctatgaaccttcacggctaccttgcgcaaaacggcattgcgtatgaaagtccggaagcgcgtgactttgcaaacacgttctttatgatggtgaacttctactccatccagcgttctgcggaaatcgcaaaagagaagggtgaaacgtttgatcaatatgaaggctcaacctatgcgacaggtgaatactttgacaaatacgtttctactgatttctcaccgaaatatgaaaaaatcgctaatctgtttgagggtatgcatatcccgacgacagaggactggaaaaagctaaaagcatttgtggctgaacacggtatgtatcacagctacagattatgcattgcgccgacaggctctatctcatacgtccaatcaagtacggcgtctgttatgccgattatggaacgcattgaagaacgaacatacggcaactcaaaaacgtactacccaatgcctgggcttgcatctaataactggttcttctataaagaagcctacgatatggacatgttcaaggttgtggatatgatcgccactatccagcagcacattgatcagggaatcagctttacattgttcttaaaagacacaatgacgacccgtgatttaaaccgaatcgatctgtatgcacatcatagaggtattaaaaccatttactatgcaagaacgaaagatactgggcaagacagctgcctttcttgtgttgtttgattaaaggagagtttatagtgacaaaaatttatgacgcagcaaactggtcaaagcatgaagacgattttacccaaatgttctataaccaaaacgtgaaacagttctggcttccggaagagattgctttaaacggcgatctcctcacatggaagtacctcggaaaaaatgagcaggacacttatatgaaggtactggccggacttacgcttcttgacacagagcaggggaatacggggatgccgatcgtggctgaacacgtagacggccaccagcggaaagcggtgctgaactttatggcgatgatggagaacgctgtccatgcgaagtcgtactctaatattttcatgacccttgcaccgactgaaacgattaatgaagtatttgaatgggttaaacaaaataaatatttgcagaaaaaagcgcaaatgattgtcgggctttacaaagccattcaaaaagatgatgaaatttcactgttcaaagcgatggttgcttccgtctatctggaaagtttccttttctacagcggtttctattatccgttatatttctacggacaaggaaaactgatgcaaagcggtgagatcattaacctgatccttcgtgacgaagcgattcacggcgtgtatgtcggtctccttgctcaggaaatttataataaacagacagaagagaaaaaagcagagcttcgtgaatttgcgatcgaccttctgaatcagttatatgaaaatgagcttgagtatacagaggacttgtacgatcaagtcggactctcacacgatgtaaagaaattcatccgctataatgcgaataaagcgctgatgaatcttggatttgatccatacttcgaagaggaagatattaatccgatcgttttaaacggattaaacacaaaaacaaaatcacatgacttcttctctatgaaggggaatggttataaaaaagcgacagttgagccgctcaaagatgatgacttttattttgaagatgaaaaagagcagatataatatctgctcttttcggcttgaaggttcaaatgaggaggacgcagtacccatgggaaaaatggacgaaatgattttagttgccccacgcgatgatgtgtttaaaaaagaaagcttaaccttccagggcgtgtacagtgaagatagcagagtagccgaaatcatggctcagattgaagcggcctatcgtgaaatgagaagaggggacgcagaagaagatccgcgtttcaagcagccgataccttatgtcgtcattaagcgtgaagatgaagtttttctttacgagcggctggctggcggcggtgaatcacgactgcacaacaagctttctctcggctttggcggtcatatgaacgccatcgaaggggcagcttcatttgctgaagtcttaaagctgaacacagaccgtgagcttgaggaagaactgcaaataaatgaagaagataaacaggcgattgtcacactgggattgatcaatgatgatgaaaatagtgttggcaaagtgcatatcggtattctttctgcgcttcaattaaagcctggcgcacaagtggaagtgaaggagaaagaacaaattgcgggtaaatggatgaaagtttctgaattaaaacaggatgacatctacaaccgtctggaaacatggtcacagtttgttgttgatattcttgaataaaaaaacccggtttctcgcgatgaggagccgggtttttttatgagacgctcgtccccgtctcggctatgattctaggatcacaatagcgtcaaagccggcatttttcgctctggcagcgagagtgtctgcattgtcattggatgaaaatgcgccaatctgcactttgtaaaatccgtcctttaaaaggacaatcgagtcaaaacctttggcttcggcattacttgcgagcgagtcggcattcgctttggctttaaatgcgccgatttgaaccttatataaccctgagctggaagtctttttaaggttaaaggcttgctccagcccgtttgcatgtcctctcgctaagctttgaataaaactgctcgttttcagcttatttgcatcggaaacggtatcaatgaagccgttctcggtcaagagggcaggcattgccgactcccttaggacgtggaagttcgctgtttttttgccgcgatcggcaaagtcgacagcttgtatcacttcagagtgaattgccgattgataagtcgtcgtcggggctcctacatctggataaatatagctttcaaaacctgtgcctcccccggaattaacgtgaatggacaaaaagaaatctgctccccagttatttgcggcatttgtccggtcgtttaagctgacatattggtcgcttgtccggctcagcagcagagaaacgccttcatattcattagttaatatcgtacgtaaggctaaagcgatttgcagggttaacgttttttcctgaaggccattacctgttgcgcctggatcagacccgccatggccaggatcaataaaaattttaaccatttttcatcacctcattacaggatatgaaaaaacacagcttctgcttgtacgattatcattcaactgaaaaatgaggaaataaccctttcacatccagaaattatttctcgggaaagcgcacaattcaacatgaagcgacaacagatacggtccgacatgaaatctgtgcatacgccatatgtttgtatgtactttgagttcggttaacctgcactgattcctgttggttttaagctttgcgttcatattaaatcaagcatttgaaacgtaaattgatgagaaaagctcctttcattaaagacaccactttataaatcgaaaaaaagaaaaacacttcaggtatcttagggcgggtaatacgcttcgtacaaaaaacagcccgttgcatgaaaaaaggattggcgaatggagaaaataatgagaaagaagctcactataatactttgacaaaatgattaaaaacaaaatctcatggtttgtccaccccatgtccgtgaatacaataagaaataaagtatttctcgggaaagcgcaggattccttattgttcccgaaaaaagcaattgtttcgacacatgataggcgtttgtcacaatcggcatccgcttgaatatcatatagagagaacagagaggtgaagatgttggagcgcgctgtgacttataaaaacaacggacagatcaacattattctgaacgggcaaaagcaggtgctgacgaatgctgaggcagaggcggaatatcaggctgcattgcaaaaaaacgaagcaaagcacggcattttgaaggaaatcgaaaaagagatgagcgcattagttgggatggaggaaatgaaacgcaacatcaaggaaatatacgcctggatttttgtgaaccaaaaacgcgcggagcaaggcttgaaggttggaaagcaagcgctgcacatgatgtttaaaggaaatccgggaacgggaaaaacgacggttgcacggctcatcggcaagctgttctttgaaatgaatgtcctgtcaaaaggccacttaatagaagcggagcgggctgacctggtcggggagtatatcggacacaccgcccaaaagacgagagatttaatcaaaaagtcattaggtggcattttgtttatagacgaagcctactcgctggcaagaggcggcgaaaaggactttgggaaagaagcgatcgacacacttgtaaagcatatggaagacaaacagcatgagtttattttgatactcgctggatattcacgggaaatggatcattttctctcgttaaatcccggtctccattcaagatttcccatctccattgattttccggattactctgtgacccagctcatggagattgcgaaacgaatgatcgatgaaagggaataccagctcagtcaagaagcggaatggaaattgaaagattacttaatgacagtgaaaagcacgacaagccccattaaattcagcaatggacgttttgtcagaaatgtgatcgaaaaatcgatcagagcacaagccatgaggcttttaatgggagaccaatacttaaaaagcgacttgatgaccatcaaaagccaagatctttccattaaagaagaagcatctggatctgcatagacctctcagtttttgagaggtctgttttttgctcgtatttccgcttttcaaagcaatcgatttgtggtatacacatgcagggtttggtatgataatactactgcccaatatgcaaaagaaaggaacatccatttgaacgaacaagaaacgattcaggagaaagccattttagtcggatgtcagctgccgcatatcacggatgagcattttgaaaattctatggaagagctagcatctctgacgaaaacagcagacggaaaagtactgaccagcgtcacacaaaaacggaacagggctgacgccgctacatatataggaaaagggaaggtagaagagctgaaggcactggtggaagagcttgaagctgatctcctcatctttaatgatgaactgtcgccaagtcagctgaagtcattggcaacagcaattgaagtgaagatgattgaccgcacgcaattgatattagatatttttgcaaagcgggcgagaacgagagaaggcaaacttcaaattgagctggctcagctgcaatatgcactgccgcgtctgacgggacaagggatcaacctttcccggcaaggcggaggaattggggcaagaggtcccggggaaacgaaactggaaaccgaccgccgccatatcagaaatcgcattcatgaaatcaacacacagctttccactgtcattcgccatagaagccgataccgtgaaagaagaaagaaaaacggtgtgcttcaaattgcgcttgtcggctatacaaacgcagggaaatcaacatggttcaaccgcctgacgagtgctgacagctatgaagaagacctcctgtttgccacgctcgatccaatgaccagaaaaatggtcctgccaagcggctacagtgttcttctttcagatacagtaggatttattcaggatcttccgacgacattgattgctgcattccgctcaacgcttgaggaagtaaaagaagcggatttgatcctgcatttaattgattcttcaaatgaggattatgcgggacatgaaaaaacagtgcttgggcttctcgaggagcttgaagcagatgatatcccgatgctgacggcttacaataaacgtgatcaaaaactgcctgattttataccgtccgccggaagggatcacattatggtcagtgcgaaatttgaggacgacgctgcagcctttaaagaagcgattcagcgctatttgcgccaagaactgttaacgtcttttgaagcacatgtgccggcaagtgaagggaagctcctttccagaatcaaatcggaaacgatgatagaccgcttctattttaatgaagaaaatgaacagtatgacatatccggctatgtccaagaagagcaaagtatcatcggtgaattaaagaagtatatgtaggaaggaaaaataaagacatgtttgacacattaacacacggagaattattgaagaaaacggcaatggaagtggaagcggacattgccggcattcataaacaaatagaagaaatcagcgagcgaaatgagtggagagtgcttcaaagctatagaaaacacaaagtaagcgacactcatttcacgccgtctactggatacggctatgatgatatcggaagagacacgcttgaaagcatatatgcggatgtgtttggcggagaagcggggcttgtaaggccgcaaatcatttcaggcacacatgccatctcaattgctttgttcggtgtcctcagaccgggggacgagctcctttatatcacgggcaagccgtatgatacgctagaggaaattgtgggcgtcaggggtggagaaaacgctggttcgttaaaggattttcaaatcggctataatgcggttgatctgacgaaagacggaaagatagactatgatgcagtcgccgctgcgatcaatccgaagacaaaagtaatcggcattcagcgctcaaaaggatatgcgaatcgcccttctttcttaattagtgaaataaaagaaatgatccgttttgtaaaagaaatcaatgaaaatctgatcgtctttgtggacaactgttacggagaatttgtggaagagcttgagccttgccatgtcggagccgacctgatggcgggatctctcattaaaaatcccggcggcggccttgcgaaaacaggcggctacctcgtcggaaaagcgaaatggattgaagcttgctcataccgtatgacgtcacccggcatcggcagagaagcgggggcatctctttactcgctccaagaaatgtaccaaggcttctttttggcgcctcatgttgtgtctcaaagtctaaagggagcggtgtttacagcgagattccttgaaaaactcggcttcacttcaaacccgaaatgggatgcgaaaagaacggatttaatacaatccgttgagttttctgacagagaaaagatgattgctttttgccaggctattcaatttgcatcgccaatcaatgctcatgtgacgccttatccagcctacatgcctggatacgaggatgatgtcattatggcagcaggcacgtttattcaaggagcaagcatcgaattatcagctgatggccctatccgcccgccgtatgtagcgtatgttcagggaggattaacctattcgcatgtgaagaatgccatatgcagtgcagtggattcattgatggaaaagcaattaatttaaatttttaaaaatttctctggatttgatgttaagaatccttacatcgtattgacacataatataacatcacctataatgaaactaagttaagaaaaggaggaaattgagatgagtgataatattcgccgctcaatgcctttatttccaataggaattgtcatgcagttaactgagttatcagcaagacaaattcgatattatgaggaaaatggactgatatttccagccagaagtgaagggaatagacgattattttcatttcatgatgtagataaactgttagaaatcaagcacctgatagaacaaggtgtaaacatggcaggaattaaacaaattctggcgaaagccgaagccgagccagcacaaaaacaaaacgagaagacgaaaaaaccaatgaaacatgatctgtccgatgacgaactgagacagctcctgaaaaacgagctcatgcaagccggccgttttcaaagagggaatacattccgtcaaggcgacatgtcccgcttctttcattaatccgttagcaactgttttgctatatacatttaccttttaagaggaggaattttaccaaatggcaaagtacactagagaagatatcgaaaaattagtaaaagaagaaaacgtgaagtatatccgccttcaatttactgacattcttggaacaatcaagaatgttgagattcctgtaagccagcttggaaaagcgcttgataataaagtcatgtttgacggttcttctattgagggattcgttcgtatcgaggagtcagacatgtacctgtatccagatctaaatacatttgttatcttcccatggacagctgaaaaaggtaaagtagcacgtttcatctgtgatatttacaatccggatggcacaccttttgaaggtgacccgcgaaacaacttaaaacggattttgaaagaaatggaagacctcggatttagtgattttaaccttgggcctgagcctgaattcttcttattcaaattggacgaaaaaggcgagccgacgcttgaactaaacgacaaaggcgggtatttcgacttagctccaactgatttaggagaaaactgccgccgcgatatcgtgcttgagcttgaagagatgggctttgaaatcgaagcatctcaccacgaagtagcacctggtcagcacgaaattgactttaaatatgctggagcagtccgctcttgtgatgacatccaaacatttaaactagttgtcaaaacaattgcccgcaaacacggcctgcatgcgacatttatgccaaaaccattgttcggcgtgaacggttctggtatgcactgcaatctatcactcttcaaaaatggtgttaacgcattctttgatgaaagcgcagatcttcagttaagtgaaacagcgaaacacttcatcgcaggtatcgtgaagcacgcaacaagctttacagcagtaacaaacccgacagtaaactcttacaaacgtcttgttcctggctatgaagcaccttgctatgtagcatggagcgcgcaaaacagaagcccgcttatccgtatcccggcttctcgcggcatcagcacacgtgttgaagtacgcagcgtagacccagctgcaaacccataccttgcacttagcgtattgcttgctgcaggattagacggaatcaaaaacaaactggaagcgccggctccaatcgaccgcaacatctatgtgatgagcaaagaagagcgcatggaaaacggaatcgttgaccttccagcaacacttgcggaagcgctagaagaattcaaatcaaacgaagttatggtcaaagcgctgggcgagcacctattcgaacacttcatcgaagcaaaagaaatcgaatgggatatgttccgcacacaagttcatccttgggagcgcgaacagtatatgtctcagtattaatctctcaatcccttggcactaaaggtgtcaggggattttttatgttaataggtaataaattatggagcggcactgctaaaaagcagggtcacttttagtctatgtcactaataattctatgtactaaattttcaattagggaaataattccacgcttaaggaagcaatacgcataaataattcgacaaattctgtgataattccattgttcaatacttctaccagcaataataagatgagcaaggtggatgattatcattgacatcataaccaaaaaaatccataattacgttgaaatctaaatcaattttcaaaaaggagatttccatgaaaaaattgactatcttttccgggggattaggagtggttttttctgtactggctcaactgtttgcggttatagatgactcttacactttggggaatttatggtttttaggtgctttggcgggaattataaccatgcttgcttcaatccagacaaataataaaccaatcttcagcattttattaatttctagttcagtaataggtctacttggaactggttttgtatacatcataccaacactgttcaatataataataatttataaattttcaaaagtaagccaataagccaatgggaaaattaaggttctttttttatttaacatccctttgacaaggtcggtaatgaatcgcagaatgttgcaactggtccacacagttggggaaatcgtgggcatgattatcgaacgccatgtttctaggataccggaattgaaacatttgctgagtcatttcgtgaagttgatcaccaaatgtccatttcaatagaggcacgtctaaagaagctatcataggaggacaatactgtgtggaaagctttaagtcaattactcaagaaacagaaaaatcaaagtccaagcgatgagggttatatacagattccagaaaaggatataaatcaagaattaaagcaagtgatatttgagttggagagcctgggggaagtagtatcgaaaaagctgcagaataagtatgcaggtgtttttgaagctcaggataaaccaaatctcagcatcaaagtttgtagagacatagatggagatgtgctaaatgattttacagctgagagatgttttgaaaaagaataccgttcacaaatagcaattaattactatcaacctgcaatagtctgtgatgaagaattagcctgtttcacaatggatttgtggtattactacggtggatataaagggacgggttgtggaacattattcgatttaaataataatgacttagaaaaagaaattgaagagacgctaatatttttgctcaatgacaaacaattcgagaaataaaaaagaaggccgcaaagcgctttcaatcaactgatgtagctaagaaaagcgtttaagaattagctgacttgggtgacagcgagttttccgggaagggtgcagacaacattaaagcattttatcatgatcatgccggcattacagatcaatgtatcgatcggattgacatggaaattgctttcttaagcatcatttttgcaaaacttgtagatgcaaagatgtaagatacttacatagaagagtcatttttaaaacatgagctggctaacgattacacaaaatcaaaattcattatgtctgaacaaaagaaaacgatgaaagacattctgaataacaccattgaataaatatcttaaggataaaaaagtgaattggtcaaaggaattgaaatatttaaaagggctattaggctccaaaacgcttgcaaaagatttaaaaatccaaatgaatgtttaagtatttgttttcaggtttagtgataactatgtctatacttaaaattatatccatttgataatccagagagaaaaaccttaatgtcccgtttaataggggaaagaactatgatatctcctagtcaccaatatataagaaatgggacaagcaaagatttgttaggcgcaactttaattaaataaataaaatagcaatcttgtgataatagtagctaatctgttggtacccttgccagcagcttttataaaacgtttttttgactttgagttgctctttcttagtctgataaaacttcttcattagcgtccgcttctcaatctaggatatgtgaaatcctcaatcgcattgcaaattcccgaaaagctttttctgtctttaaatcaagtccaaacttcattctctcggccgtctaagaagctaatttactgcttcttcttttcaggttccatgtaccggtctttacagtgtctgggagaaaaagtgatttggggcattcatctttttttatttcagctagcgaagtgaaagaccgatggcatttttcctgcatataatagctggaactattcaaaaaggcagggaatgaagttgagtgaatgatgtgattgtaaatggaggttttgaaacaggcaatctgacgggctgggcttctgcaaatacgtccgttattaatacttttgcccattctggaagatattccgcacagtttttcagtaaccagccgtatgcttttttagggcagatcgtgcctgtcgtttctggacaatctctgatattcatcgtttcgcttgggagaattggaaacaattcaagtccccaagtaactatacaaattttatttgttaacagtgaaggcgaagagattgaaggcggacaggaaattatcattgcttccggaaatttgccaaatgtctcatttaatacatggaatgaaatatatagaacaattgaaacccccgctgaagcagtaaacgcagtggtggtaataagcaaaactacttttgggtctgttctaattgatgatgtttctttaatagagtctgctgggggaattggaccgactggaccaacaggtgcaacgggagcaacaggcgcaacaggcgcaacaggcgcaacgggagcaaccggagcaacaggcgcaaccggtccaactggagtaacgggagtaacaggggcaactggtgcaaccggatcaaccggatcaaccggatcaaccggagaaacaggatcaacgggagtaacaggggcaaccggagcaacaggagtgactggatcaactggcgcgaccggagcaaccggatcaacgggatcaaccggagaaacaggtccaacaggaccaaccggagaaactggagcaaccggaccaaccggatcaaccggagttactggagcaattggagccactggcgcaacaggatcaactggtgcaacgggagtaaccggagccactggagtaacaggattaactggaccaaccggagaaactggtgcgacgggagtaaccggagccactggagccactggagtaacaggattaactggtgcgacaggagaaactggaccaaccggagcaacgggatcaaccggagtaacaggtgtaacaggatcaactggagtaacaggatcaacagggtcaacaggatcaacaggaccaaccggtccaacaggagtaacaggatcaaccggagaaactggcgcaaccggatcaactggagaaacaggagtaacaggatcaaccggatcaaccggagaaacaggtccaacaggaccaactggtgcaacgggagtaaccggagccactggtgcaacaggaccaactggtgcaacgggagtaaccggtccaactggcgcaaccggagcaacaggcgcaaccggtccaactggagtaacgggagtaacaggggcaactggtgcaaccggatcaaccggatcaaccggagaaacaggatcaacgggagtaacagggtcaaccggagcaacaggagtgacaggtgcaaccggatcaaccggagaaactggtgcgacgggagcaattggtgcaactggtgcaaccggagcaacgggagtaactgggtcaaccggagcaacaggagtaacaggtgcaaccggatcaaccggagaaactggtgcgacgggagcaattggtgcaactggtgcaaccggagcaacgggagtaacaggatcaactggaccaaccggagtaacaggtgtaacaggtgcaaccggatcaactggtgcaacgggagtatccggagccactggagtaacaggattaactggaccaaccggagaaactggtgcgacgggagtaaccggagccactggagccactggagccactggagtaacaggattaactggtgcgacaggagaaactggaccaaccggagcaacaggagtaacaggatcaaccggagaaacaggtccaacaggagtaacaggatcaaccggagaaactggcgcaaccggatcaactggagaaacaggagtaacaggatcaaccggagaaacaggaccaactggtgcaacgggagtaaccggagccactggtgcaacaggagcaacaggagtaatcggtccaactggcgcaaccggagcaacaggcgcaaccggtccaactggagtaacgggagtaacaggggcaactggtgcaaccggatcaaccggagaaacaggatcaacgggagtaacagggtcaaccggagcaacaggagtgacaggtgcaaccggatcaaccggagaaactggtgcgacgggagcaattggtgcaactggtgcaaccggagcaacgggagtaactgggtcaaccggagcaacaggagtaacaggatcaactggaccaaccggagtaacaggtgcaaccggatcaactggagaaactggagaaactggagatacaggaccaaccggagaaactggtgcgacgggagtaaccggagccactggagccactggagtaacaggattaactggtgcgacaggagaaactggaccaaccggagcaacgggatcaaccggagtaacaggtgtaacaggatcaactggagtaacaggatcaacagggtcaacaggatcaacaggaccaaccggtccaacaggagtaacaggatcaaccggagaaactggcgcaaccggatcaactggagaaacaggagtaacaggatcaaccggatcaaccggagaaacaggtccaacaggaccaactggtgcaacgggagtaaccggagccactggtgcaacaggagcaacaggaccaaccggtccaacaggagtaacaggatcaaccggagaaactggcgcaaccggatcaactggagaaacaggagtaacaggatcaaccggatcaaccggagaaacaggtccaacaggaccaaccggtccaacaggagtaacaggatcaaccggagaaactggcgcaaccggatcaactggagaaacaggagtaacaggatcaactggcgcaaccggagcaacaggcgcaaccggtccaactggagtaacgggagtaacaggggcaactggtgcaaccggatcaaccggagaaacaggatcaacgggagtaacaggggcaaccggagcaacaggagtgactggatcaactggcgcaacaggagtaacaggtgcaaccggtccaactggagtaacgggagtaacaggggcaactggtgcaaccggatcaaccggagaaacaggatcaacgggagtaacaggggcaaccggagcaacaggagtgactggatcaactggctcaacaggagtaacaggtgcaaccggagcaacgggagtaactgggtcaaccggagcaacaggagtaacaggatcaactggaccaaccggagtaacaggtgtaacaggtgcaaccggatcaactggtgcaacgggagtatccggagccactggagtaacaggattaactggaccaaccggagaaactggtgcgacaggagaaactggtgcgacgggagtaactgggtcaaccggagaaactggagtaacaggatcaactggaccaaccggagcaacgggagtaaccggagtaacaggatcaacagggtcaacaggatcaacaggaccaaccggaccaaccggatcaacgggagcaacaggagtaacaggagtaacaggtgtaacaggtgcaaccggatcaactggagaaactggagtaactggtgcaactggagatacaggaccaaccggatcaacgggagcaaccggagaaacaggagtaacaggatcaaagggagtaactggtgcaaccggagaaacaggagctactggtgcaactggagatacaggaccaaccggtccaacaggagtaacaggatcaacaggtccaacaggaccaaccggaccaaccggagaaacaggagcaaccggtccaacaggagcaaccggatcaactggagtaaccggagcaactggagcaaccggaccaaccggatcaacgggagtaaccggtccaactggagcaaccggatcaacgggagtaaccggtccaactggagcaaccggatcaacgggagtaaccggtccaactggagcaaccggatcaacgggagtaaccggagaaacaggagtaacaggattaactggtgcaacaggatcaaccggagaaacaggagcaacaggagcaacaggagcaaccggatcaacgggagaaactggcgcaaccggagcaacaggatcaacgggagtaaccggagcaacaggagtaaccggattaactggtgcaacaggagcaacaggagcaacaggagtaactggtccaacaggatcaacaggagtaaccggagaaactggtgcaaccggatcaactggcgcaacaggagcaacaggtgcaaccggatcaactggcgcaacaggagcaacaggtgcaactggcgcaacaggagtaaccggtccaactggagaaacaggatcaaccggatcaaccggagcaactggtgcaactggagcaacgggagtaactggagccactggtgcaacaggatcaaccggagcaaccggtccaaccggatcaaccggagtaaccggagtaacaggtgcaacaggaccaacaggaccaacaggaccaaccggttcaaccggggcaaatccacagctgttttacagtgaaatagcaggccccgttccgcttgctattaacggtactgaaacgtcgattggtactttaagtgtgccaacagtcgcaggacaattaataaaattagaccttgccatttctgtagatgttacaacgacagctaactcaaactttacttttcaaaccagaatttatagaaacggagtattagtagatacacgctccgtccaaagaaatatcagcgctgcaattacgtcaagatttccaattgctacaacgtatgtagatgctaccacggtcacaggcacgacttcttatgagattaggataatcttcacaacagtaagtaatgtgagtggcagcaacgcactaaacctagatataaatgctattaggttcccttaataatagagaattaaaaaatcacttttttaaaaaaattcaagcatatgaaacaagaaacctacttttaaacagtaggtttctttgtcgtggtattgaaaccttatcatgtctcggaatatccctccaaaaattttttaaggtaataagaatactggtctgtatcaaactcgttgccgcatgcatgtaagacccaaggctctttctgatgagggatgcccactatatatcctttttttctgaactcaaaacattgagaagtatcatataaatgccatccgttaaaaatatcttttcgccatggaacatcgtactgagtcgccagtaataaaccgtctaatgcttgaactgctttcacagtttcatcaatttcatcaaataataaatagttgtacgtgctgcggtattcaatgacttttccggcttttttagaagcctcccaccaaatcccgctttgcggcacttcttcagctcctataacgcctatcatgccaagctgatcattctgctgaaagacatggagaatatcataaataaaggaacgattgatgataaatgtgtcctgatgtaaatacactttatattttgagtcagagtcctccattgccgcctggtagccggacgccatactgtctgcgtctcggatattgattaattctaccttcatatgcggcggtacagaaagagactgaagatgtcttagacagagatcataaagggtatcgtcattcacacatgtaataaagctaattgaattttcgtttgtatgctgattcatcttttctctgcctttatgacatattgataggctctggcctcctcctcaagatctgcatggtgaattcccatgcatgatctgacataagcaagtttgctgatcattttttcataataatgagtcgtaaaaacaataggctcgatttggatgatcttgtagcctgtttcatgaaacatctttttcatttcctccaaggtgaaaaaacggaagtgtgttttatcgagcagccctgcctgtatatacgtccatttgccggacagcagactttcgaaaatcgagatatgtccgatattcgggatgcttgccaagatactccctgtttcttttacataaggcttgatgttacctaaaactgcccacgggtctattaagtgctccagaacatcaccgaagataatgtgatcaaatgtgtttttttgaaaaggcagcttcagtgtttcaatgtctcccgttattacttcgtcaatataatgtgttgctttttcggcagctggtggataagactcgatcccataataggagcaattcgttttttccttcacagctgcgccaaacaagccttcagcacatccgacttcaagaatggttttcgcatgcggttctatcagatcaaatagctgccagttgatgcctttgtaatactctttatcttttagctcatactctttcatagaatcagcaagtgaatttttattgatttccatgatgttcacccccggagccggtctgcatctttagaatatcttcaaaatattttttgttggctagcattcttgaatcatggggacggtattgcaatgccgattcattatgctgataggcaagctgatgctggccgagtttatcgtagcagacggctaattgcaggtggggaagccaggtcgcgcaggcgcggttttgaaaagccaggttttctgctcctttgttttctattgctttttcataccaatagaccgcactctgaaaatcgtttttttctaaaaaagagtatcccagcctgcagcaggtttctgctctaggcggtccatagacgagcgtgtggagcacccagcttaattctttttccttcagccccagtgaatggtagcagtctgctaatttattgcacgctctgatattatcctctacccatccctgcttcgtttgtaaaaaacgtaaatagtactcaatcgcttgctccatttttccgtgatcacacaactcgttcgcatagtaaaataaatctcttggagaaaaatcctttcctgacgaggccattttttcataaattcggaggttgcgatctgcgtcatgactaagtggcaggtgagaaaccgctgcatcactgtggtgaagtttcccatatacttctaggtattcatgaaccgcgccgatccatttaaagctcttttcccgttttacgagccggtatctccttaagctggatgtgacgttattttcttcatcaaaagccaaatggtatttcattgagaccgcgtctatatccggatcaagcgttctttttaaatccaataacagctcttgatctttcttggtaaacacgtcgtcggcgtcaagccataagatatagtcggatgtcgcctgctgaaacgaaaaatttcgggctgccgcaaaatcgtcaatccatttaaaatcaaagattcggtctgtatagcgagcagcaatgtctttcgtcttgtcaactgacccggtatccacaatattgatctcatcagctatctcctgcacagaatctaagcatcggccaataacagcctcttcattttttacaatcatgcataaactgattgaaatcacatcgccacctccgttttattctgttttttctttatggcatggacaaacatgtaatcaatatgggcatgttttgacaagtgatccaaagacaaaccaaattgcccggcaaggaattgaagttcttgtaaaaagagctgtatgtttgattcagtatcggaggaatgggaggtgatggattttatgtcataaaggtattcaggaaatagggtatttacgttgcgaggtgtgatgaaatgtgtgtacgtcgatgcaccacataataaagagaaaaatgtatctgcataggcagtatttgggatgctgcaaatcagcgagccagaaggctttagataaacggcaagagtctcaattgtatgtctgggattttttgagcagtttaaaaggtcaccgatcaaaattacatcgaaaaaggactcagggtaagggaggtcgcatgtttccacatctgccgaaatgacttgttcgtaataggggcttgcaatggtctgtaataactcatccttttcaatcccatacaataaacaggattgccggttcaaaagttctgtccccgcagctcccgtgccgcaaccgatatgtaagatagagtcggcttccgctggcacaagtgctgtcagctggggctgggagtcaaagaatgttgttacatccaccttccatttatcgatgaagcgttgccggttttcttcgtataattgattgatgcttaaatctggattgcctgtaaacgtggcatgaccgtgatggtggacaaacgaatcaagagcgataattagctgataccccgcttgcagtacgcggaggcttaaatcatcatcctcaaatgaaccgcctacaaaacgttcatcaaaaccgccgacttcatccaacaccttctttttgacaagcaggcaaaatccgaccagcctcaatacagcttttgatctgcctcgctgctgcaaacagtaaagacgagaaaaatcttcaatttcttcaacgtttgtatagttaacgggaacttgctgcggaccgctgacataattgcttacaggcccgaccatgccgattttatcatcctgataaagcagcttgatcattggctccagccattgatttgttacaacagtatcattgtttaaaaaaagaatattgtcccctgaggcaacttcaagaccctgattacaggcttttgcgaagccttcgttcgtcttattaaaaatcgccttaattgaagttatctgtttgaggtagtcacgtgtaccgtcatgagagccgttatctataacaattacttctatacagtcattattcgtatgcttccatatgctctccaagcattgttttgttaaagctaattgattataagtcagaacaataatactcgttttcactataacctccgcccttcgccatatcattcggatactatatgtatatcgtaatgttcagacggaatgattctttcctgtaaaaaggagaatgctgcttaaacgtaaaaatgtgaatggttttttaaagaaaaagtcgatgaatttgttttacatttagttttcccttaaggggatcaacaaggttggggaattcagggaaatagggatgataagttgccttaaccagtttgtatgaaagttatatttaattctttctgtactaaatggtgaattaggagttatatatttaaaggagaataccgatgagggcattattttatttaatacgtttatagcaggggagaaggacgaaatatcggtcagataaatttttatataggtttcgtgactttaaagggatcaattatgatttatagaatgttttttgtaactcaaactagttgagtactactttagaaagaatcatcgtgtacatataaacaatgataatttaatgaaatggacatcaatggtgtttccagaacatttaacgtagtttaaataagatttgattgacgtatcagaaattgaaaaaccgtccttagattagcaacatattgaagagatggatcttctagtctatgaggcacttgaatttaacaaagaattgctatcgagactatttgagatgtgtcgtaaatccactaataaaatctgtttttgaagaaatgtttaattcttaaaatggttaatcaatttaagtgcttcatttaagtctcttataagccgataaagtttactggaggacacaaatcataaaaatccccccaaaaaaatttttaagggggaataatacatatttaagaagtgtgacctctacttgcaacttcaaatgagtctttctcaataaaatatccaatatttttactccgactttagaagaagagatcatttgctccaacacaagccctcctatattaaatatgtaatattttatcatatttaaatgaataaggaagattaatgttatcttaaaaaacaaaaaagcctcctgcaaattatgagaagggtaagggaatatttttgagaatcatattccattgcttgttcacagtcagtaatccttgagttgttctagcaagaggcaatattgttgaataagaatagttttaaagaggttattgttgtcttcatattgaaataaagactaagtatattagaggggagttactttaatgcatatcacaacaaaaaggttattgatacgtgaatttgcattcacagattggcaggctgtatatgagtatacatctgatagtaatgtaatgaagtatatacctgaaggggtttttactgaagaagatgcaaaggcatttgtaaataaaaacaaaggtgataacgctgaaaaattccctgtcatactaagagatgaagactgtcttataggccatattgttttttataagtattttggtgaacatacatatgaaattgggtgggtgtttaatcccaattatcaaaataaagggtatgcttctgaggcagcccaagctatcttggaatatggatttaaagaaatgaacttacataggattatagctacgtgtcaacctgagaatattccctcataccgagttatggagaagattggaatgagaagagaaggcttttttaaaaaatgtattccaaaaggcaatgaatggtgggatgaatattattacgctattttagaggaagagtggaattgtaagagaggtaatgcaggaaattgaaaccataacagctatagaacgtatagtgatagtagggcttatagtgcttaatatgaatgatgtgagaggggtatccaaatgcaaattcatctcaccaaaagcggaaaacaagacaatcatcataaatggttaggaactgtcttgctcagttggggaacattcgtatttgctttgttttttgctactttagtcggttcaatggctagccaagcaggagcttccaagcttttgaagcaaggcatccaagcaggtttagtcacattaataactgtcccgttgctctacattcttcttaaacggatgtctagtagacccttttattctataggactgtctgggtggcggcaagccattccgaaagccataataggagcaatatatgtgattgtactatccgggtctggtttcgctatcgcccatttattaggctggatcaaagttacacaatttcacttctctgtccatttagtgacagcattgctcttaaatatgattatcgctttcttttatgaagcttttccagaggaattaacttttcgggggacggtgtactatgctctaaataagcgttggaactgttttatggccttactcctacagccgatcctgtttgtgcttgcaccaataactgtaagtggcttgcaatatatagttggaattgaatcatctgctatcacattagattacattgttttattgttgggttttggattcatccttcaactcctgcgtattgtaacaggaagcttatggacgtctatcgcttttcatctagcctttcttgaaaattctcggttcttcgtcctgcaggggaaggagcgctttattacctatgaagaaattgttccgggaacaggtgcgctgtttgtgatcttttttatgttgcttattgccggtactctactcttaatacctgttgcgataactcgccgaaatactattcaatggcggaagaatgagaaatgcgaccaagatgtttaatttctaagtagaacagtagttttaaagtgattttaaggaggatctagacaatgttgaagaagcattcatgatgaaagattagtagattttgattctcaaggtggaaaccatattagtgtttatttagttactcactttgagttatctgatcaatcgtattcttttgggtatgaagcataactgttcgtatgcaatggatattctaagcgttaaagaggaatttgatttcgatttcccatttaatatgcttgcaataaaaagctatgtacaagaattaataaaatgttagggattgatataactctgcctgaaatgaaagaaagagattttgacaaactttctcaagattaaataaaactacgattttaaagagaacggagacttgctttcaatatgaatgttaaaaaaactgcagctgttttttcaatcacgattccaattatctcagctatcctaattattaatttttttacgggagttatgtcaattccatggcaaggaatgccggtgttttttccattattgctttctcctataggaatcattttagcgttcgtttcaataaagacaaataaacggtgtgctttatatgggattgtcttaaatgcaattatgtttccatttccttttttctggtttatcggaggggctttgttttttggagtttaaaatccattaggcattacgcttatacattggtattttcgaacttgtcaaaagaaggaataaaaaaatttcagaattgcttggctttactttatgttgaaaggggtcgagtaaggtggataggaaaaaggatgaaatacaaagaaaatatagggaacaaatgagggagaagaaagaacgagaaaaagaagatggcagttcacatacttttgaaattgttgttgtgctagccattatcattttgatgtttttctttaattcagttttcaaggctttttagatattgtacagatgactttcaggatgtttgaaaaaataaccctttgatatatataccacatgaaagtattgaaggacttatgaaaattcaagagccagttgaatcttaataattaatcaccaaataatggggatgtaaaatgaaattgtataatgaatttatcaatatagctaaaatttttaataaagagctagacatcattccattattatatggatctttaggtcttgaaaaggtaactgggttagacttttctccagaagatattgatctccttattcctttaatttttttagaggaaaagtgggaaaaactaaaaaaagtgatggaactgcatggatacaaaatggttgatttacatgagcatgaatttaagaaaactaatacaaaaataggcattgcttacattgaggatttaaaagcatttgcagatgtagactataataatctagaggtttttgaagatggcggagcgaaatatcatttgctaacgattgatgattacctcaaggtttataaaaagtctttattagatggttatagaagaaggaagaagaatcataaagaccaaagtaaaattaacatattgaataaattaatacggaattaatttctgtattctcttttgtttccagtctcaattaaaatttttaagattaaaataagtttgaaaggataaatcatagtgtttaacacagccattaatcctcagacagtcaaaaagccatttctactccggttgaaagcttttcaatttttgcttcttatttatctttcctgtattgatatatgtatgtagggttggacttataacataaactattctggccattcctgttctttcaattcatgaccgggcttgccatcagcataaatctaggctaacagtctccatacatcctgtgatcacctttatcaaactcttaaatgcaacttaccactaaccaattctttatttcgcatagatcatctttgtcatgtgtttacacaagaatctgttttggactaatcgtcgttaactgatacatgacattcgcaaatatttgagacactgaatataacgaaacagtcaaaaatcaatatttaattcattctgtttaaactttctgaaaaagatgttgaaaaagttgaaaggattttataatattaaaacaagttagtttgttcgatcaacaaactaataagatgaactttcattgtccacaagataaggtcttactaaatatggatggaagggggataagagggtcgatttaatggagctaaacaatataagaaacgaaagaatgaggcttttatccttttccaggtatataaggtatgacgagaaaagatgaattttttgcttgctgatcaccatattttttcgcactgttttgaaagcgcttttataaaagtttactgaccgtaaattcgagaaattgttataccgtttcacactgttccatattaaaggatcgaaaaggggagaaatcatgctcagtgaaaatgtaaagaagattagcatggttgaaaaagttggatatgcgtctggagattttgcttgtaatttaatttatgcaacagtgtctacgtatcttttgttcttctatacagatgtttttggtttatcggcagcagcagccggtactatgtttttagtggttagaataatcgacgctctcgctgatccttttatcggaacaatagttgacagaacgaacagcagatttggacgctttagaccgtatcttttattcggagcttttccatttgtcatactggcaatactctgttttacaacaccagacttttcggatatggggaaattaatatatgcctatataacctatgttggcttgtcgcttacatacacaacgataaacgttccatatggcgcgttaacttctgcaatgactagaaataatcaagaagtggttagtataacttctgttcgcatgttatttgcgaatcttgggggacttgtcgttgcattttttgttcccttactggctgcttatttaagcgatacttccggcaacgagtctcttggctggcaactaaccatgggtattttgggaatgataggcgggtgccttttaatcttttgttttaaaagcacaaaagagcgggtcactcttcaaaaatccgaagagaaaattaaatttacggatatatttgagcagtttcgtgttaatcgtccacttgttgtattaagtattttctttattattatttttggagtgaattccatcagtaattcggttggcatttattacgtaacgtataacttagaaagagaggatttggtgaagtggtacggtttgataggaagtttgcccgctttggtcattttaccgtttattccaaggcttcatcaatttttggggaaaaagaaattactaaactatgcattattactgaatattatcggcctcttagctttactgtttgttccgccaagtaatgtttacctcatacttttctgtcgattaatcgctgctgctggaagtctcactgccgggggatatatgtgggcgcttattcctgaaacaatagaatatggagagtacaggactgggaaaagaatgggtgggctcatttacgctataatcggatttttctttaagtttggtatggccttaggaggagttgttccgggtctggttcttgataagtttggatatgtggcaaatcaggcacaaaccccaacggcattaatggggattctaattacaacaaccattattcccgtgttcttgctggttctagctttaattgatattaatttctataacttagatgagaaaaaatataaaaacatggttcgagaattagagaatagagacaaagtttatttggatcatattgatgatttcaaagcttaaaaaagaaaataaactgaggaggagtcccaaatgaagattaccaatccagtacttaaaggattcaatcccgatccaagtatttgtagggcaggaggggattattatatcgctgtatctacatttgagtggtttccgggagtccagatacaccactcaaaagatttagtaaattggcacttagttgcacatccattacagagagtttcacaattagacatgaaaggaaatccaaattcaggtggggtttgggcaccatgtttaagctatagtgatgggaagttttggctgatctatacggatgttaaggtagtagatggcgcatggaaagattgtcacaattatttagttacttgtgaaacgattaatggtgattggagtgagccgattacattaaatagctcgggatttgatgcttctttgttccatgataaggatggaacaaagtatttattaaatatgttatgggatcaccgtattgatcggcactcatttggaggaattgttatacaggaatattctgataaagagcaaaaattaatcggtaaaccaaaagttatatttgaaggaacggatagaaaactgacagaagctccgcacctttatcatatcgggaactattattatttattaactgcagaaggaggaacacggtacgaacatgctgctacaattgcccgttctgcaaatattgaggggccatatgaagttcatcccgataatccaatcttaacgtcatggcatgacccaggaaatccattgcaaaaatgtggtcatgcatccattgttcaaacacatacagatgagtggtatttagctcatttaacgggacgtcctattcatcctgacgatgattcaatttttcagcagagaggatactgtcctttgggcagagaaacagctattcaaaaactttactggaaagatgaatggccctatgtagtaggtggaaaagaaggaagcttggaggtagatgcaccttctatacccgaaacaatatttgaagcaacgtacccggaagttgatgaatttgaggattcaacattaaatataaattttcaaactttaaggattccattcacgaatgaattaggttcattgactcaagcgccaaatcatttacgattattcggtcatgaatcattgacctcgacatttactcaggcatttgtagccagacgctggcaaagtctccattttgaagccgaaactgctgttaagttttatccggaaaattttcaacaagccgctggattggtgaattactacaatacagagaactggacggctcttcaagtcacgcatgatgaagaacttggccgcattcttgaattaacaatatgtgacaacttttctttttcacagccattaaataataaaattgttattcctcgtgaagtaaagtatgtatatttaagagtaaatattgaaaaagacaaatattattatttctattcttttaacaaagaagattggcacaaaattgacatagcactggaatcgaaaaaattatcagatgattacatccgtgggggaggattcttcacaggggcctttgtagggatgcaatgccaagataccagtggtaatcatattccggccgactttagatattttcgttataaagaaaaataatttgcacatgaaaaaggagatttctattttagaactcctttttcatatgagaaggtgcctatgtcactattgcttcagaaatacccctagaataaaaaaactcatctttaaagatgagctgtacattccataaaaattacattgtaaccatgtccagaaaatgatcaatcacaatggaggacattcctaatgccggcgcattctgtcctaaggaagatggcaataattcatagctattgcctaattgggaataaacccttgacgatacttcacttctcattgaatttaaaaccataggatgtgattcaattatgctatttcttaaaattacggcctgtgggttgaaagtattcaaaatattggtaaggcctattcctaaatagaatccaaaattctgtaatgcgtttaaggttccgatatcattcagatgggcgaggtttatgatgtcttgataggacagttttttctctttggtctgaagagattttaataaagccttctctgaagcatacaattcccagcagcctcggtttccgcaactgcatttaggaccattaaagtctattgtcatatgtcccatttctccagaaaagccgcttactcctctatataaatgattgttgataataacaccgatccctatccctgtgctgatacttacgtaaataatgttatcgtgattttttgcagctccaaatactttctctccatatgcgccagcatttgcctcattttcaataaaaacaggcacattgtacttctcttgtatcgaagattttaagtcaatatctctccagttggagttcggagtgaaaacaattttttgatctttatcaatgagtccaggcacgcaaatacctataccaataagcccgtacggagattggggcatatgcgtcataaagtgatgaatcatatcaatcaaaatgtctttcgttatttctggagaattggattccaaatgacggtattgatcaagaacgatcgttccttcaaggtctgttaaaatgccattgatataatccacaccaacatctattcctacggagtatcctgcctttttattaaaaacaagcatgacaggtcttcttccgccacttgattgtccttgacctatttcaaataccagattttctttcattaacgtgtttacctgtgatgaaacagttgatttatttaatccagtcatttcagataattttgctcttgaaataggtgaatttttaaggatttcttttaataataacttttgatttacttttttgacaaaggtttgatcagcgatatccacttcatccactccatttgtttaatctttaaattaagtataaacatagtacatagcgaatcttccctttattatatctaatgtgttcataaaaaactaaaaaaaatattgaaaatactgatgaggttatataagatgaaagtaagttagtttgtttaaacaacaaactaataggtaacttacaatatgaaataaaatgcatttgtatttgaatgatcaggttttgaatttatttttaagggggaaatcacatggctcaatctcattccagttcaaccaactattttggaagcgcaaacaaagtggtttacgaagggaaagattcgactaatcctttagcatttaaatattataatcctcaagaagtaatcggcggaaaaacgatgaaagagcatttgcgattttctattgcctattggcatacatttactgctgatggtacagacgtttttggagcagctacgatgcaaagaccatgggatcactataaaggcatggatctagcgaagatgagagtagaagcagcatttgagatgtttgaaaaactagatgcaccattctttgcttttcatgaccgggatattgcaccagaaggcagtacgctaaaagagacaaaccaaaatttagatatgatcgtgggcatgattaaagattacatgagaaatagcggcgttaagctattatggaataccgcaaacatgtttacgaatccccgtttcgtccatggtgccgcgacttcttgcaatgcagatgtgtttgcgtatgctgcagcacaagtgaaaaaagggttagaaacagcaaaagagcttggcgctgagaactatgtattttggggcggccgtgaaggatatgaaacattgttaaataccgatttaaaatttgagcttgataatttggctagatttatgcatatggcagtggattatgcgaaggaaatcgggtacacagggcagtttttgattgagccaaaaccaaaagagccgaccacccatcaatacgatacagatgcagcaacaaccattgcctttttgaagcaatatggcttagacaatcattttaaattaaatcttgaagccaatcatgccacattagccgggcatacattcgaacatgaattgcgcatgacaagagtacatggtctgcttggctctgttgacgcaaaccagggtcatcctcttttaggctgggatacggatgaatttccgacggatttatattctacgacattagcaatgtacgaaatcctgcaaaatggcggcttaggaagcggcggattaaactttgacgcgaaggtcagaagatcttcttttgagcctgatgatctaatatatgcccatattgcagggatggatgcatttgcaagaggattgaaagttgcccacaaattaatcgaagatcgtgtgtttgaagatgtgattcaacatcgttaccgcagctttactgaagggattggtcttgaaattatagaaggaagagctaatttccacacacttgagcaatatgcgctaaatcataaatcaattaaaaacgaatctggaagacaggagaaattaaaagcgatattgaaccaatacattttagaagtataacaggataagctccagatcctgctatcaataccaagtcactgaattacccgtcatgattcctttcctattgcttgttgttatgacgggtaacttctataattaggatttatttagagtgaatggtttttaaaagggcaaggagtgaaaaaatgaagtatgtcattggaatagatcttggaacgagtgctgttaaaaccattttagttaatcaaaacggcaaggtttgtgcagaaacgtccaaaaggtacccgctcatccaagagagggcgggatatagtgagcaaaatcctgaagactgggtacagcaaacaattgaagcattggctgaattggtttctatatccaatgttcaagccaaggatattgacgggataagctattcgggacaaatgcatggattagtactgcttgaccaagatcttcaggtgttacgtaatgcaattctttggaatgataccagaacaacgcctcaatgtataaggatgaccgagaaatttggcgatcatcttcttgacatcacaaaaaaccgtgttttagaagggtttacattacctaaaatgttatgggtaaaggaacatgaacctgaactttttaaaaaaactgctgtgtttttgcttccgaaagactacgtgcgattccgtatgaccggtgccattcacaccgaatactccgatgcagcaggaactttacttttacatattactcgcaagaagtggagcaatgatatttgcaatcaaattggtatttctgcagatatttgtcctccgcttgttgaatctcatgattgtgtagggtcgctgcttccgcacgttgccgccaagaccgggctattagaaaaaacaaaagtgtacgctgggggagcagataatgcttgcggcgctattggagcaggtatcctttcttccggaaaaacattatgcagtattgggacgtcaggggtcatactttcctacgaagaagaaaaagaaagagactttaaagggaaagtccacttttttaatcatggaaaaaaggattctttttatacgatgggcgtcacgctcgctgcaggatacagcttggactggtttaaaagaacgtttgcaccaaacgaatcgtttgagcaattattgcagggggtggaagctattccgataggagccaatggactgctatacactccttatttggttggtgaaagaacgccgcatgctgattcttctattcggggaagcttgatcggaatggatggagcccataatagaaagcattttttgagggcaataatggaaggtatcacattctctttacatgaatcaattgagctattccgcaaagcgggaaaatcagttcatactgttgtttctattggtgggggagctaaaaatgatacgtggctgcaaatgcaagctgatattttcaatacgagggtaattaagttagaaaatgaacaagggccagctatgggggctgcaatgctggctgcctttggaagcggatggtttgaatcccttgaagaatgtgcagagcagttcattcgtgaggctgctgcattttatccaaaggcacaaaatgttcaaaaatataaaacactatttgatttgtataagaacatttatactcacacaaaggatctcaatcaagctttgaagagctttcgaaaaaactaatgatgttattgtctggagatcaacgaaagaacaattaacgattaatcatcaaaggcctttgatgacatggctgccttcttttgaaaagatggtgagaataaggtatcgcaacctttaaacagtattggagtgtccagcagacaaaacgaacgagcggaaccgtattctgtcagcgaacacttcaagaagtgagaaagcttaggaatgccaatgggtaagatgtatgaaaccgcgctaacgacggtagagggatctcttgatttatgatgaaataggaaggatgtttacacacaaataaccccctcacattgacgtgaaggggtgttttttattgttactatacagcggaaattttacaggctagttgcatgattttagcttgataagcagaatggaactagactctccatcatctctttctaattctttggaaactgcattctgctaggtttgctgctttttttaacaaacagtgtttttctatttcacacagccattaaatcctctgttcgtcacataaccgctcttactccaaattgacagtttatctgattttgcttcttgctcatctagtctgaattggtctatgtattttgtgttaggctcatatacatatgctactctggccaatccctctttcaataatgtctcttgaacagatttgccgtcaacataaacgtatgctaacagtcttccatacttatctctgcgatcgcctttatcaaattccagctgtagcttaccgctgttgaccaattctttatttcgtttcgacgcatcctcaccgtatggttgaacacaagaatttggtttcttcgtctcaggtgtatcaacgagcaagtagcgcactgtgtcttcctttccgttgtaaataaccttaatcgtatctccatctattgctctatctaatgtaacatcgaccaatttcttctgattttttgaatgaggcgtgccggccttttgttctgtctgattatatttattagattgagtatcttgagagacttgctccgtcccattagaatctgaatggtttttggctgcgtgatttgatccgcaagctgccaaagtaatacttaaaacgattgcgatcatactgatcaaaatcttcttcatattgattccctctttatcattttctctttttgcgtttaaacatcatcattataacgatatggacattttttgtgaatggaaaacttcaagggaacttataacactccaaattgccaatagttaactttacaacgagatgatcaaaacatcaccatcacatagcggaaataaataatcctgaaaataatattgactgaaaatgcttttggaattatgataatatgagaaatgacaataatgtaacaaaaacattactacaacataacaactgatagcttaggtttattctattggctaaaaatgtaaacggttacaaatccagaggcgaaaatctaagatagagatgactttagttttgactcaatatccacactgaaagagcttattaagtattcttaataaaggcaggggaaatggatatgaatgaacatcgaaatcgaaggttgaaattaataatgatttcagcaacttttggagggcttctctttggatatgacaccggagttataaatggagctttaccttttatggcaaggccagatcagcttgatttaacaccggttacagaagggcttgttacgagtattcttttattaggtgccgcatttggagcgttgttatgcggaagattggctgatcgatatggccgacgtaaaatgatccttaatctttcctttttatttttcctggcatcactgggaacagcgttagcacctaatgttttcatcatggcggcctttcgttttttactggggctggctgttggaggagcctcggcgatggtgccggcctttttagcagaaatggcaccgcatgaaaagagagggcgtatggtaacccaaaatgaactaatgattgttggcgggcaatttttagcatatgtttttaatgcgatcctcggtgtaacaatggcaaatacgggacatgtttggagatacatgctagtcatttgtgctgttccggctatcatgttatttgccagtatgcttaaggtcccagaaagcccccgatggctaatcaccaaaggcaaaaacagtgaggcgctgcgagttcttaaacaaattcgagaagataaacgtgcagaagctgaatgtagaaaaattcaagaagcggtagaaaaagatacagcactagaaaaggcatcactcaaggacttttctacaccatggctgcgccgtcttttatggattggaattggtgttgccatcgtgaatcaaattacaggtgtgaactcgattatgtattatggcacacaaatccttaaagaatctggttttggtacaaaagcggctttaatcgctaatattggaaatgggctgatatcagttattgcagttatatttgggatttggctggtcggaaaagtgagacggcgtccaatattattgattggtttggcggggacgactacagctctcctattgattgcgattttctcaattgtgcttgatggatctatggcacttccttatgtagtgctttctttgaccgttttatttcttgcctttatgcaagggtgtgtaggacctgtgacttggcttgtcatagcggaaatattccctcaaaggttaagaggacttggttctgggataagtgtttttttcctttggatattaaactttgtgatcggttttgctttcccgatcttgcttagctctgtaggtttgtcttttacattctttatatttgtggctttaggtgtattggcaatcggttttgtgtacaaattcatgccggaaacaaaagggcgtacacttgaagaattagaagagcattttcgttctcgacacgatcataatactcctgaacaatcagttattgagttataaatatgttgaaaatctctcttcttataggagggatttttttagtttcagaaaaaacaaaatccctctggtagagggattttgattcagcattttaagatgttctacacgtataatactggagttgatactttaaaaatctcgccatctcttatataaaaacgagggatgcggcggcttaatgtagacacgacttcatagttaatcgtattgagcatttcagccacttcatcaacggaaatctcggctcctttttgcttaccgtaaatcacgacttcttctccttgtttaccttcaccgttttctcctaaactgaccatgatcatatccattgttactcttcccgccactggcactcgttttccgcgatgaagaacaaatccgcgattggaaagggcacgagaatagccgtcagcatagccaatcgggagtgtagcaattacttcattaggttctgcgatgtatgtagcaccatagctaacggttcggggttctgtccgcatggttttcacataagcgatgcgtgcctttaaacttaacgcaggttcaagcttaacgagatttagttgtttaatataggctgaaggatataaaccatataagccgatacctaaacggatcatatcagcgctaaattccggaaatgcgatagctgcagccgtgttgcacatatgcacggtgggcagctcaatcccctgtttttttaaaaagctgagaaaactgatgaatttttcatgctgcagctttgtgagtgtggtgtccggttcatcagctgtcgaaaaatgtgtgaaaatccctgtccatctgaggaatttacttgcctttaaggctttcactacttctaaaagttcttcctttgtgcgtacacctaatcgtcccatgccggtatccacgttaatatgaatggccagccggttagcactcgcttctttttccaatatctcgtttgcttctttcatccaatcaacctgaaatgctgataatgttatattccaagctgctgacttctttacacaactaagggatgtaaaaccaagcacaaggataggtgctgtaatcccagctttacgtaaaacgattccttcctccacactggcaacagcgagctcactcgccccgtgttccagtgcatggcgtgccacttctatagacccgtggccataaccgttcgcttttacaacagccataattttgctcttatgtggaatatgacggcggatcgctcgcaaattctttttaacggcatcaagattgacttcgatccaaacttctcggcaaagctttatcatcaacgcttccttccttcttatggattgtaaataccacctattgccgcaagaataaatgttaattgttggatgattcgatcttattttattcaactttatttgaaatcattcaacagcaaatccatgtgatacgagaaggtgcctatcaatgttcgaataatagcaagtacgggatacatgaggcttgtaagtggggtgttaatggatgcggcgaccgaggattacaaaaatgattatttgttttgggacatttttttctaagggtagatgataacgagaaatctaatcaggaaatacttaccgttgttatgaacattgaagaaccttttaaatgagaagggctgaggaaattctgtaaaagataatcggttgaaaaggcagtcgattccttgttccataaacctaacatcagagtatataattatactcgtattcacaaaaatcgtttaagtaaggggtatacatgaataggggagttagttttcaaataccgaatgaatatggaaattttctatggagaatactgcagccggtagaaatagctaattataggtggcaaacgagtggggaatcttattttgttgtagaaggagagctcgatgatgaggagctttttcatgactacgcaattgttgagggggcagtttttgagcaacaattaaaaacgaatcagtactataccattttcgttgaactgaaagcatttccatatggaaaaatggttaatcaagtcaatacatatgaagagtttgctgacagtgattgcgaacttgtccttttgatagcagataatagctacgtttcgatttactgtaaaaacaaaaatatcattgaaaaactttacttcaatgctttacagaatgattttgaagacgttcaatttataactgatgaaaatgacacaagaacaagccttactgtatgatactcaataaaaattaaaggagctagtacatgacaatgcaaattaaaatcaagtatctagatgaaacacaaacaagaatcagcaaaattgagcagggagactggattgatcttcgggcagctgaagatgtaacaatcaaaaaagatgaatttaagcttgtcccattaggtgttgcaatggagctgcctgaaggttacgaagcacatgtcgtccctcgttcaagtacatataagaactttggcgttattcaaacaaattcaatgggtgttatcgatgagtcatataagggagacaacgatttctggttctttcctgcttatgcattgcgtgatactgaaattaagaagggtgatcgtatctgccagtttagaatcatgaagaaaatgccggcggttgaattggttgaagtcgagcatttgggaaacgaggatagaggaggactcggttcaacaggtacgaagtaaacaaaataaatccttggctgtcttcatgctgtgtgattgatcaatggaggtttcagccaaggtacaaagaaatacttttatctaaatttttataagtaggggaaggcaactacaaactagtaatgccactaataataagccaagttaaatgacatgtgttcattaataattgaatttacagcagccatgagcacaaaaaaatctgagtatcgtcgataaatatcataaaaaaccccccggtatgtcgccggggaataaatagacgtttaagagatttagtgatgttttttatatgattcgacaaaatcataataatgatcatcgtcatcataatactttttttcgtaatgataatcgtgatcatcgtaatactttttatcatggtcatcatactttttgtcgtaatcataatgttttttatcatgatcataatacttgtcgcaatcataatgcttcttatcattgtcgtaatactttttgtaatatgtttttttccaagtgtaatactcttctttatattttttataataacccaattaaattcctcctttatgttattcgaatttaatttatgaagtttaaatgatatggtatggtcaaatgaaataagaatagtaaaaagaggctgtttaaaacactttctgaaaaacaaaacggatagctgtttattaaaacaagagcgagagaaagcactcaatcactgtaaaataatagtaaagtgtatagagaggattaatatacgtaaaaagggactttctcattgaagaatatttgaacgttatggttaagattcagagctctatgatgtgatttttaacactgcttttgaaggatttaaagttagacatcaaaaacaaacagcaaaaccggttagaaacagatcatataaggaatgaaccgctgccaaatatcataaaaaagttgttaatgatcaaatgaatgaaattagagagaatttattttaaagaaagcccaattgcacatggacaaatgacaattgatattgaggtaaaatacaatgcattaaatcagaaaaagctattggaggatttaatgtgtttagacaatttccaatttggtatacacaaacacctgactatttgaatttttatgtaccgcaatatcaaaccatttcgtataatcctcaacaatgttatcaacggtgtatgtaccaaactggcggtaactatgagctatgtgacagactatgttatggagaaatacaggtgtaaaagaggggggattaactcctctttaaacacacagtgagtggaataagatcctcactttatctgcaagtgcttagtatttgcgataatattgcattcgtaataaattatgcttagcaactgaaaatgaaagaaggatatgaatagtcatgacgcaattcgataaacaatacaattcaattataaaggatattatcaataatggaatctcagacgaagagtttgatgtaagaaccaagtgggactcagatggaacaccggcacatactctaagtgtaatcagtaagcaaatgagattcgacaactcagaggttccgattttaacgacaaaaaagcttgcctggaaaacagccattaaagagttgctctggatttggcagctgaaatctaatgatattaatgatttaaacaagatgagcgtacatatttgggatcaatggaaacaagaagacggcaccatcggacatgcatatggatttcagttggggaagaaaaacagaagtctaaatggagaaaaagtggatcaggtagactatcttcttcatcaattgaagaacaatccatcttcacgcagacacattacaatgctgtggaatcctgatgaattagacgcaatggccttaacgccatgtgtatacgagacacaatggtacgttaaacatgggaaactccaccttgaggtaagagcacggagcaatgatatggcattgggaaatccattcaatgtattccagtataatgtgttgcagcgcatgattgctcaagtgactggttatgagcttggtgaatatatctttaacattggggattgccatgtgtacacacgtcatatagacaatttgaaaatccaaatggaaagagaacagtttgaagcacctgaactatggatcaatcctgaagtgaaagatttttatgactttaccatcgatgatttcaagttaatcaactataaacatggggacaagcttttatttgaggtagcggtttaatgctgcctttttattgttatttttcagaatataagctggcattaggctaaaaatgaagaaatttcttcttcatatttctataaacaaatagtaaacaaaattggagcccaacgcgaaacaaaaggattgttagaagcgttgggttctcttagtacaagtgaacaacgattgcgtggtctgaaaaattaaacgaacgatatgaaaaggccattggttttataaggtgttaattcctcctattaatatcataaggctcaagaaaattgtaatgaaaagaaaagcccatactatagctgtaaaaggattgttgagtcccatcctttctttccaatttatattagtggatcgattggttttgtattttattaactggatacataagatcacattaaaaaaaactgaaataacaagagctataactaaataaaggttcattttcatcaacctttctaggttttttaaacacttgaatagcttaattgtaaacctaatattaacatatacatatttcaccttaaaagaccagcatcgtgcaatgaatacaattactttgtgcagttctaggttatttgtttttattatgaaactttttggtccctggctaaaattcaacttaaaaatgaaaagattgaaattatccatgattgtgtttctgcgatggattgccttaaaatttggtagggatgaacaagcactatattaaataatactataccaatgaatttctattagaaaaattcataatattttaaaataaccatttaaatatatttctagaaattgtatacttatatggtactaaatgaatacatagaaaggactgttgtcgatgaaaaaagttttttgtaagttagccattagttctatagctctatttaccctatctcttcctaatggcaatgtattagctgctgaaaaaggggaagaaaaacctgtctcaattaaaggcgttgagtcacaagtgcatactgtatttgcaaacgagacaactggggtaaaaagcaacttaggaggaggagagtttactgcgcaatttgtgaatgattttcgtaatgttaagatgaatgtaaaaacatataaaagctggtctagctttaaaagagtttctgataatatagcaacggggagtaaaggaggatctattactgcaaacaaaacagttacttttacaacaactgtcagcggatctataagtggtttaggaatatccactgcaggctctgtagctagctctaaaggatacactctaaatgttggagcgaataaaagagtctatatggcatatagagttaggtataatgtagaagaagggtacaattgtcgtaaggatatagttactggtaaatgtgtatcaaagaaaaaatacgtagttaaaaaacctatgtatggagaatatgcactgaaaaactattaattttatataaaaaagattagctataaaagctaatcttttttattaagaagaaaatatcctaattttgaaacgagatacaaagtgaaagcaatcattaatgttctcgatataacaattccatgaatagccaaatcatatccagcaggtatcaaagcttttgtattaaacataaaatacattgataccagaagagcaataataactaaaataattccaaaaagacctatttttccgtatttcatacaaattccaccctatattaaaatatgataaataaccaaaggagctgaagatttcgataattcactttacaatcatcaagcaatgaccaacatcgaacctttgttggtgtaattgtcaacttaagcttcaagttagttatttttgtaattaaaaaataattgaaagccccataaataaggggcttttaatttatgtagttctatagtaattgaattaatcataccaaagttatttcaaaatttcaacttttgcttatgatgtttttatcatcgaaacaaaaatgtcttaattctaacgctgttcaaataaagtttcatataaaaaggaagtactactgttcgtaaatctatatagggagtggattccgacacggttttttatggagatggaaaattaattataaaaccgccagacaatgctggcggctttttgctgcttcgtttatttattaacagagatcgtaacgttatttcctgcaactgaaacctttgcgaaatcctgtgtatctaccacaggagtgacggctttattgtcgattgtgatgttgttaaaagatgtcgaaaaggttgctttgatcgcatcacgctggctttcatacgaaacagccgcggtagcaagggttttccattttgaaatcgtgccgatgttggttccttgaatttctgtgataatccgtccggtgtagccgtcattgttcgttccccaaagggtcatgcgcgtattgccgcttaaatttttatagattgtcatttggactgtgcttccagggcggaagcctttattgtatgtgaatttgtcttttccttcgatgtacgtttcttcatttttggacccaaccttcatgaggggcttccagacgttgtattgtttgctgtactgaagcccgatatcggcttcagttccgcttgttgccctaaagccagaataaatatagggagtagagaccgagtcgttgtttttgacagtttcaggaagcgtgattttagctgtaaaaatggcgcccgtactgttcaggtagacacggccgccgattccgttaggcagctgggatgctgcttttgcgacttgagcgtctgccgcgggtaaacctggtatacctgatgaaagggttccgaaaagaactgcagttcctactgcacctgcaatcaatacttttttcatcaaaattccccctttagatagtggtttcgccatttattatacctaattttggaactggattgatgtatataaatcgacaaaatatttcattttgagtgaagtaagggacgaaacgcttcgccaatctgaaagctatatacctttatcagaggaaagaatgagatcacaatcgttttaaccgatttgaaattttcctcaaaataaaagtacaaatgcttaaagaaacgattattaaaagaatgcccgctatcgtttcccagcctgtaaaaaagaggtgacgtttcatcaatgtctgtccttgtaaaatgataaaagcacagataccgactaagaaaagaaaacaaatacttaggattgctaacgctttacgtgagtatgttttcatttcatctttaaaatacagcaatacgaaaacaaagcagataacattggctattgtgcttatcacctcaaagcttttcatgacaactgatataaatagacaaagtaaaatgagataaaatacgatgtttctatacaaaaaacctctccttttatgtatgatcctcaaagagtttataaaagtttctttgtaactgcaataaactgaatgcgctcaattatgaactaactaaactatgtactaaatattcactattcattttcagattcagtcaccaaggttttcatagaaagggaagcttcagaaatatacatatagtgcacaaacaaaaaagacccggcaatagccgggggaaagtaaaaacgaggagatgttaatggcgtttagtagtgttttttatgctttttatactctacaacataatcatagtcttttttatcgtgatcataatattttttatcatagtcatcatattttttgtcgtaatcacagtcataatcttttttatcatgatggtcataatcttttttatcatattcgtaatacttcttataatacgtttttttgaccgtataatactcttctttgtattttttgtaataacccatatatactcctcctttatttttactacgctttattatacggcgagtagattttgcggcttggacagttaaaatcatagaaggaaaaaagggctgtccaaatgatagaaaaagacagatgacacaaaaacaaatcaaaataaagagccgatttttcatcggcccaaacgatttatcctacatttgtttgtcttcttttttttctgagtcattttttctgatatcctgagtcagtccgcttgttgcttgtttaaattctgataaggcttttcctgctgcacggccaagcgccggcagtttatcaggcccaaatactaaaaaacccacaaacaaaataacgagtatttttgtgaagcttaattccatatccttttccccctgattgaagtacaaccttttaaacaaattataagagatagcagtacaaatgggaatgcatttattttgaacattttaaaaccagacaaagacggattcataaaacggctgctgctgaatataatgtccaatgccacctgcctaagaagcagggaggaaggctggatcaattatgtagctctgccggaaatgatacaaacgtatctgcggctatcattgaaatagaggagtggtgtagctgatgagattcactaaggtagttggatttttgtctgttttagggttggctgcggtttttccattaacggcacaagcagaaaaagccggaactgcgggggctggagaatgggataagttggggacttacacatatacttactcaagtccgacggtatactcgaccggaggagattttagagtgtgcctttcaggaagcactcctttttctgtttcactgcacttatatgaggatgatcccggtgacaatcctgatgattatgtaggggcaaactatttttcacccggagaatgccacacctttggcagtattggaaaatttgtagatgggagcaataacaaggccgagttctttgttaccgattactctggtaaatctaaaactgttacgttttatgattgatggactcaaattgtgaagtataactcttgggaaaaataaaaaagagagagatacctctctcttttttattcttcgacagctttacgaagccgttcatttacaatgccagtccagccgccatccatcttaccgcgaacgacggagcttttctcgtttgctttgccgatcacttcattcggctctttccagccgctgtgaataagggtaaaccctgtcttttcccccaagtcttctaattgaaaggtaacgacccatccttctgtatcccattcaaaagaaagttcagttggagcttgaacagccaaaactttacaaggggacggcccaaacggcgattgtaagtgaaattcttgtccttctttgagctgaaagtcattgggcataaaccacttggcaatgccttctgaagtagagactgtctcccagactttctgaatgggagcctccagggtaatgctttttgtaatatccggtaatgcattttcgttgttttgagccatttcgtttacctcttgacatatgatgtttttttcaattcaatcatataataactaatatgatcatgtccatagcgtgcattatttatgctagagctgctgttcaacagcgtgtcagttgccagtctgatctgtgaatgggagaattctgcatgttcgagaaagagagagatgtgtatgttgtcatttcgttcatgcttgtttgctcagccgcaacagttatgtttgaactggaattcctgttcagccaatttattttgcgatttttgttttaatagtaaatgagccattttctaaaacaggaggttttttatgcttggaaaaatcaaagcagccattgataacagtccagggaagccggccagaattatagttagtgaaaaagcgtttcagcaattagaggaagaaatgcgctttgtttacgtttccaaaccgaaaacgataatggggattcctgtggaagtttcagaacaggcagaaagcttcaagctggaattttagtttatcccagactgctaaaaggctcattttatgataattatgcaaaatggtcaggttggtttctttaaaagcatgatgaaatgttcatcatgctttttttatcgagaaaaaagacgaacataaaaaataggtatacgggaaaaataatcctattagagagaggggaactgacagatggataacatgatatcaacacttactgactggaatgtgtggtttcaagtgttaattgtatttctcgttccatatgtaatctataaagtgtttacttggattcatgtataagaaggtgcaatgatgaggtggcggagcaatcagtacaaaacacagaagcagcatatatcaggtcattcaacagctgaaaaggatcaggatgtgttaaccggtaacatcggatacgatttagaacatgtaaaaagaaaaataggacataacggggacgttcacttccgtgagcttgaaatcactcatttacatgtaaaagcggtattgatctttgttgaaggaatgtctgatcaggaattgattaataaaggtctatcagtgttagttatgaatcaacctaatcaggtaagcgatgaaattcaatccggcaaaggtactttaacttcgaaacagataaaaaatcaaatcatatcaatcggtgatgtcatagaatcagagaaaatcagtgatatcgtgttgaatgtgttcatgggttcgacagcgcttctcatcgatggaataccgcaggcctttcttctgggaactgtaaaaaaacaaaatcgaagtatcgaggagccgctttcagaagcgcttgtcagaggaccgcgcacaggctttacagaagagttgagtacgaatacagctcttttgagacagcaaggaaaaaatgatcaattaacattgcagagatttgaagtaggaacacgattaaaaaaggatttaatcatcgcttatatgaatgacattgcagatccaaaagtagtcgaggaagtaagaaaaagagtgagagggattgagatcgatcatttgccggagtcaggttacgttgaacagttaattgaggataattatttgagcccgttcccgcaagtacagagtacagaacgtcctgatcgcgtcataagcggattaatggaaggaagagtagccattctgcttgacggcactccgtttgctttgattgttccagtcactttcagcatgatgcttcaatcgcctgaagattattatgaacggtggttcccgagctcgctcatcagattgctgaggttcatcgcagcaatgataacgttattcgcacccgctttatatatatcatttatttcttttcatcctgggttaattccgaccaagctggcgatttcaatttccgggacgcgccaaggtgttccgttcccatctctgattgaagccttatttatggaagtcgcgattgaaattttaagagaggcggggcttcgtttgccaaaaccgattggacccgcaataggcatagtgggcggattaatcatcggggaagcagctgtgcaggcggggattgtcagtccaatcatggtcattgttgttgcgctcacagcaatttcttcatttgccatcccgcattatagcacaggtatagcacttcggatgcttcggtttggcgcgatgttttgtgcggcggtgtttggattgtttggagtcattatgtattatctgctgctaagcagccatgtcgtaaagctaaagagctttggtgtgccatacgcaagtccggcagtgccctatcacttaaaagattggaaagactttgttatcagaatgcctcttttagtcatgaagcgccggcctaaaatgatgaatacagataatacaaaacgggtgaagtgatgaactcgacaggatggtgataaagtctcatgttcagcccaaccagtaaaatcacaaccgctcaggcaacgattatcatcattaattatatgcttgctgccggagttcttacgctccctcggacagtaacagaacaaacacaatctcctgatggatggatttcagttttattaggcggggtcctagcggtaatagccgggatgatgatagttaaattaagccagcagtatcctaaggagaccttttatgaatactcccgacatattgtaggaaaatggctcgggcatctgatcagtattgtttttattacttattttctggcactcggtgcatctgaagtcagagtcatgtccgaaatcgtggatttttttctcctcgaagggacaccgtcttgggccatcattatgacagttctttggattgggctttattcaattacacaaggcctagatccgattgcacggctttttgaaatgatttttccgattacggtcatcatctttttaacgatagccctcatgagtttaggcatatttgagatcaacaatttgcgccctgtattaggtgatggaatcatgccggttcttagaggtgtaaagacaacgaacctttcatttacatgttcagaaattatgttcattttagtagcatttatgaaaaagccgaaaaatgcggtgaaagcagttgtgatcgggacaagcgttgtgaccagtttttatatgattacgatgattatggtcatcggtgcactatcagttgagggagttgtgacgagaacatggccggggcttgacctgatgagaagttttgaaatacctggtttaatatttgaacggtttgaatcatttctgcttgtgatttggattatgcagctttttgccacgtttattatcactttttatgcagcttccctgggagtctcacaagtttttaaaaagaaacccctttcatgtatgtttgggctgcttcctgttatatatatcctctcttgcatgccgaaaaatgaaaatgacgtctttatattgggcgatacggtcagtcatatcgctttgtatatatttggcgctttgccgattttgctgttagtcatttcgaaatggaggaaaagaggtgaaaagtaaactaaaacgtcaattgcctgctatggtcatagtatgtctgctgatgatttgcgtaacaggatgctggagcagtcgggaaatagaagatctcggtctcacattcgctatcgcaattgataaaggaaaagaaacgaacactgaaaaagagttaaaagaagagggcgggagctatccgaaaaaagacaacattacgctgacctatcaatttgttaatgaaaaagcggcaggcgcgggcacaagcgggggaggcggtagcggacaaggagcgcaaaaagcgtacattaatataagtgaaacaggggattcattacagcagatcggaagtgaggttgcattaagacgggaccgagaagtgtttagcccgcatttaaaagttgttgtcatgagtgaagatgtgctgcacacatttcctatcgacgaaatgctggatcaattttttcgtgataatgaaatcaggctgagttgtcttgttttatctgctaaaggggaagcaagagacgctctccagctgaaagagaacggagaaatcccggcttttcggctgattggattaggtgaaaatgaacataaagtttccagaatacttccccctataacactcgcgaaactaattggaaaactgcattctggcagcagttttttactgcaaaatgtggttgcggcaaatggagcggtcaagtattccggagcagctgtaatcaacggaaaatcgaaaaaaatgatcggcactttaaatgaatatgaaactgaggggattacatggattagaggagaagggaaaggcggagttgtcaaaagtcatgataaaaagagccaacagacattagcgtacgatatcaataaaatcaaaagcaaaattcagccaatcgtaaaagggaaagatatttcattccatgtcgatattgaatcagaaggcgatttggttgaaaactggaacacaaaagaggcgttggacacccagtttatagatcgtctcgaaacgactattgaaaacgaggtaaagaaaatagttggtcaggtattaaaaaaaattcagcatgattataaagcagatgttgcgggttttgatgaatcttttagacttacatatcctcacttatggaaaagggtgaaaaataactgggatgacaccttcagtaaagccgacatcacatacagtgtgaacgtcacaattactcatttcggcacggttaaaactcagtaatgaatcccaaggaagagaaggaaacctctcttctcttttttatgcattttttaggatgaagatactttttttggagagatatacacttttcaaatcgaccaatatgctaatataggaattgcttgaaatagaagggacaaggggctgtgaggcagaaaccgatttatgtagaaatcgaaatgaaatctgatctggatacactctgggaatatacacaaaacccatcactgcataaggaatgggatctccggttttcaaatattacgtatttgaatagtcagccatgcgaaaaacagaagtttctttacgaaacaagggtaggctttggattaaaggtgtcaggtacaggagaaaccgtcggtgttttcaacaaatgttcatctgaaaggtcttcttcactggcttttggctctgatcatccattatctctgattcggcatggaagcggctactggaagtatatacagagagaaaatgggaaaatgacgtttttaacacagtatcaatacaaaacagcctacggactgccgggaagatggattgatcgtttattatttcggccgctgcttggctgggcgactgcctggagctttgatgcattaaggctttgggtagagcaaaataaacatccgaagcgcttcattcgatctgctatcatctatgtgttcatgtgtctgtttttcagcctgttttggttctatcaaggctttgcaggtgttaagacaagcatattggcaggaacagcggagataggcttagctattttgtggctgcttcctttaaaaagaaaatggatcattcatggtgtccaggcttgtatttttgctgggtttgcttgtctaggttccgaaatattcatgtgggttctgttgagtgtgttttccgctgcaagcggcgctcttagcctgcagctccccagtgccaggcgcacaaaacgaaagagaaagaagtgacattgtgagttcgatttatgaaaaatcaattattaactatcatttgctgcatcccaagctgcagaaacggtaccaattagacgggtctcatacattcagcgggacgggaacgatgtcagaaataagcggaggctcttttctggttagaatgctgttaaagctgggtgtttttttcagatgcttcttttcagaaagaggcaaagacattccatttacaatacaaaatagaacttgtcttttgaaatcgcaacatacaggaatagaatggaatcgtacatttttctttaaaggcaaaaaacgtttctttgatgcgttaatgatatatgacgagaaagaaaatagaatacttgatttcttcggcaaacctcatctgctgctgtctgttttgacgttcgaggcatctcatgacggctctcttacgatcacatcgggaaagcaatggctattaatatgcggaaaaagaatcccgctgccgaaatggctgaccggtacatccgtagtttgcgaaacgtttgatgaaaaaaagaattgtttcaccattgaagtgcatgtgcaaaatacaattcttggcactcttttcttttataaaggaacgtttcaggaggaagagagagaatcatgaaacgaaatggcatagtcagtgcgctttgttttattggatttcttgcagcagaagcaccggatatttcagtggcagaggcactcgttttgttatccattctatttttcgtgccgggaatttttccttttgtttttcgtcaatctccggttcgtgctgctcagtttatggaatatgggctaatccagtggtatccggcagccgcattctttgcggtgctggctctagtgacggaggttgggggtttcgcacttatctggtggatgtacacagtttttattgcattgtatgcgatcctccgcctttgggaaacaaagatacatagaatcgaagagacatcagttttgttcggccttatttatttggcgggaggaggattttggttttttgcttatgctgcccatttgcagatcatgcaatttggccctctcatcattttgctgactgctgtccactttcactattctgcttttctgatcccgatcttcaacggtttactcggcagaaccattagaaaacatcggatgttgtacagttggataacatgggtgatttttctttcgccccttcttatcgcactgggcatcacatattcaaaaacacttgatgtcattgcggttagcatttatatggcggcgatttatcttcatgcatttttggtgttcacggcagcttttcgcaccaagacggggacatttcttattcggctttcttccgctgttttaatgataacgattgctttctcgatgatttattcatttggtgtatttcggcaagaagttacattgaccatcaatcagatgatttggattcacggttttgtcaatgcgtttggtgttatcttgcccgctctcatagggtggagaatagaggatgcgaaaccttttgatgcagacagtgtaaagacattcagccgtatctacggaaaaagaaagattggagaagaatttttagctaacattcaagctgaaaataacgctcggtacagcggacttgtggatgatatgggcagcctgcgttcaaaagatttttcaccagaaaaactggagccgctcattctttcgttttatgaacaaaccatcgaatacaatattaaagcaaaagtaacatggagcacgtggtttcggccgcttgcaattatttacgaatggttcagcagaagaatcggccaaatacatctttcgacgaaccctgactggtataggatgtacagcaagataagaggtgttcattctaaaaaagacggaagggaaagagtacgtgcctggattagaacaaatgaaaaaaacgaaaccatttttaccgctctttattcagtgtatcgttcaaatggagaggggtatatgaatatttctttaccgcttccattcagcagcatgacaggtattttaaaaccatatcatcaccaggagaagctggttttaacaagcaggcggagaaaaagcagagcgggggatgagggaatttatctgcaaacaagagcgggaacttgtccgcttcctttatctgaaacctttctgatagaagctgcacatgacaacaaattaaccgctgttcatcatatgtggctgtttgaaataaaatttctaactgttcattacagcattacacatattaaccagcctattgaaagaacctaacacaaagaagaagcttcgtctgccagttgctgcatttcaaaattctgcaccgcatcaagacaggaaaggaagggtttatggtgttttatatcagtttatttctgattctttggctggctgcggggtttgcagtgggaatgaaacaagtgtatgtcgatcagctgtttgataaaactgtgatcgaaaggctggaaaaagaagcgaatgatcatggacaagctgaccggatgatcaaacagcgcgccctttatattgcagcagtgacattaagcgggtttatttctgtttattatgaaatgaaaacaatcccgcaaaggcgaaacataagaaaaattgaaaaaaacatcatgaaattaaatcaagtaaaaaaacgaagaatgaagagaaaataaaaatgcacaggccaaagggcaggtgcatttttgttttgtatggaaatgggggaggtggtgccagcttacttttcataaattcaaaaatgagaagaacagcgcccgggctaatggtatataatattgtgaatttaacaaaaatttaacaaggaggacgagagaattcgtgcttaagcctcaaagagacctacatcctgttgatttggacttagaggcggagtagatgaaaccggccaaagtatccctgctccgccgtttgctccattccttgaagcatgttgattgtaacatagccaaacgttttccatcaactattaaaattgtaaaattattgtttatttttatggtatttactccgatttcttcaatttctgctgaagatgtataccagaattttgaggaattaaaaaacaatgaagatccttctgattacgacgttgttacgaaagaaaacggaagccctgttcttgttttagccattcacggaggaggtattgaaggagggacaagtgaagtagcgagagagctcagcaaagagtactcgatgtatttatttgaaggcttaaaatcggcaggaaactcagtcctgcacattacgagcacgcactttgatgaacctcgggcccttaaaatgacgggaaatcatgaatatgtcatttcattacacgggtacgcagaagaagatcagcagatcgaagtcggcggtacagatcgcgtaagagcggcagatttagttgagaaattgcagcatgccggttttcctgctgtattgctcaatacggaccatccacatgcgggcgttagtccgaataacattgcaaataaatcaaaaacaggtttaagtatccagatagaaatgagcacaggctttcgaaagtctttgttcggcatcttttctttaaaaagcagagctgttactcaaaatgagaggttttataagtttacagaagtgatgttccgttttctcaaatatagctactgaaaaataggaggcgataagacagcctcctattctttatgcttctcattcgtttcgggaaacagctcgtccgcggcttccgtttgatactgcaacgtgttatctctcgctgacagttcatttcggaaattttcatcaagtacatttttcaataaataccgatgaaaaaagaattcaaaaacagtaagacaggcagcggaaaggagagctgctccaaatggtgagaaatcgtttcttgtttgggttaaaacaaatacccaaagaataacgaatgaaaggccaaagtcagccaatgaagctgtaatattgtttgttctgggtaagacgagcatgtcaccagaaagataggaaacaaaacctaagaaaagtgcaataaacatcacacttaagaaggatgcgtgatagactctgtccaaaatcacatataaaagggcgagagtgaaagcaatctttgaagcaagcgcaatgatatgtttcatttgaccacctaaattgttattttttgaagaaaattcttgggcgtaaacaaatgataaataatgcaattcaaaaccattcataatggtcatgttactattttaaacagtccgtttttgtttacactggtattttttttcagcagtatgaaactttcttatgaaaaaagacgtatatgtggatgatcagctttcaaggggggaatgatttgtggagataaaaggaatcaatcacttgctattttcagtttcgcatttggatacatcgattgatttttatcaaaaagtgtttgatgcaaagcttttggtaaagggaagaacaactgcatattttgacatgaacggcatctggctagcgcttaatgaagaaccagacatcccgagaaatgacattaagctttcttatacccatattgcttttacaattgaagatcatgaatttgaggaggtatcagctaaattaaaaagacttcatgtcaatattctgcctggcagagaacgagatgaacgcgatcgaaaatcaatttattttaccgaccctgacggccacaaatttgaattccataccggaacccttcaagacaggcttcgatattacaaacaagaaaaaacgcatatgcacttttatgatgaaacggccttttgacatcacacaccatatttcatataaggttaaatttaaagaagggtgttggtggagactttatgtttggagaaggtttctacccgattagttcaacgatgccatatcttttgaactgcacaagtgattccgtgaaggagaaattgaaatacatattacattttatatgaagaaagcgagctgttttaacagaaagatgaactaattagactgtgtactaaattttcagtatatttcaattacctcgccccttaataaatatgaaaccgtatccttccacgacctaaaaaatgaaacgtttttaagaagatggcgtctaatattttaaatgttcatattttgataaaagtttcctaaaggaaagaaaatttcttgacttcaacaatcttttggtggataattgtggtgtaaacatgatgttctttttcctcctattcaggctcgcacccaaaagtcagggcgagcctgctttttttgaacaacaaaccccctctccgtaaaggaagagggggttattttatgcatctgatagatcaatagattaatggacggttctgaacacgccaatcactttccctagaatgctgacattctgcaaaatgataggttccatcgttgggttctcaggctgcaagcgaatgtgggtatcctctttatagaatcgttttacagttgcttcatcatcttctgtcatcgcaactacaatttccccattgttcgctgtgttttgctgtttaacgatgacatagtccttatcgagaataccagcatctatcatactgtctcccataatctccagcataaatacatgctcgtctggaggaaccatgcggtctgggagcggaaaatattcttcaatattttctactgctgtaataggagatcccgccgtgactttcccgatgaccggcacattaacgacctggctttgcggaatgtctacttcttcatcaagaatttctattgctcttggttttgtcggatcccgtctgatcagcccttttgtttccaagcgggccaaatggccgtggacagtagagctggacgcaagcccgacagcctctccgatctctctcacggaaggcggatatccttttgatttaacctctgctttaataaaacggaggatatcaagttgcctttttgatagcttcgtcatttttcgcacctcaaaacgtcgattttaagaagattatagcatgattttccttacagtacaaacataggttcgaaaaaacaattgacagaaacgtttgttcgtatatactgaaattataaaaatgcgaacaaacattcctgttggaggttatgatcatgagtaaagaatctattatttttgtcggtctgttcacagtgattttgagcgcggttatccttatgctgtcatatacaagcagcggccaagagcttaatcagtatgttaaaatagaagtccagcaaggcgacacactctggtcaattgctgatcaggtagcagatacaaaaaagataaacaaaaatgattttattgaatgggtagctgataaaaatcaacttcaaacctctgatatccagccgggtgatgagttagtgatcccattgaaaaagaagcatcaggatgcatatgaattagcaactgtaaaatagagaggaaagagagataaaatgaaagcactcatttatgcccgtgtaagcacaaataaagaacagcaggaaacgtcattaaagcggcaggaggaggagcttacggccattgcagcggagaacggtatggaagtggtcaaagtgattttagaaaaagccagcggatatgaaatggatcgggatggtgtatttgagctgcttgatgagattaagaacgctggaattgatgtcattttggttcaggatgagacaaggctcggacggggaaacgcaaaaatcgcactgcttcattgtatttatagagaaggtgtgaaagtctatacaacggctcatagaggtgaactggagttatcggaggctgactcaatggtcttggaaatcgtcagcattgtggaagagtatcagcgaaagattcacaacatgaaaatcagacggggaatgaaacgtgcagtaaaaaacggttttaaaccgcaaaaaaacttaaaaaaccaacatgggaacagtggaaaagaaaaaatagaggtgccaatctctgagatcgtccgcctaagagcgaataaactgacgtttgctgaaatcgcggctaccctaagagggtttggctatgatgtctctaaagcaactgttcaccggcgttttcaggaatacatagagaatgaagagacagcagagtgaatcagttgtaaaactttttttgatctagtactatatagacaaaatgcaataaaggagtttaacatgatttcaaacgcgaaaattgccagaattaatgaacttgctgccaaagctaaagctggcgttattacagaagaagaaaaagccgaacagcaaaagctccgtcaagagtacttgaaaggttttcgttcttctatgaagaacacgttaaaaagtgtgaaaatcattgacccagaaggcaatgatgttacaccagaaaagctaaaaagagaacaaagaaataacaaacttcactaatataagaggaatacggcaatatcgtattcctcttttgcatatactataatcaaaactcttatgtgacaaaattcaacaagtttctctcaaatttaagctgaaacagttgagaaaaagtcgtcagacatttatgatgtaagggtacaacacataaggaaggggatttttatggatacaattgaaaagaaatcagttgctaccattcgcacactgtcaatagacgctattgaaaaagcaaattctggtcacccagggatgccgatgggagccgctccaatggcatacacgctgtggacaaaatttatgaacgtaagtccggcaaaccctggctggtttaaccgtgaccgttttgttttatctgctggacacgggtcagcactattatacagcatgcttcatttaagcgggtttgatcttagtattgaagatcttaagggattccgccagtggggcagcaaaacaccaggacatccggaattcggacatactgccggtgttgatgctacaacaggtccgcttggccaaggaattgccatggcagtcggtatggcaattgctgaacgccatttagcggaaacatacaaccgcgattcatttaacgtagtcgatcattatacatacagtatttgcggtgatggtgatttaatggaaggtatttcttctgaagccgcttcactcgcaggccatcttcagcttggccgtctgatcgtactatacgattctaatgacatctctcttgatggagacctcgaccgttcattctctgaaaacgtgaaacagcgttttgaagcaatgaattgggaagttctttatgttgaggatggaaacaatattgaagaattaacagcggctatcgaaaaagcacgccaaaatgaaaagaaacctacattaattgaagtgaaaactacaatcggattcggttcacctaaccgtgccggtacatccggtgttcacggtgcgccgcttggtaaagaggaaagcaaattaacaaaagaagcttacgcatggacatatgaagaagacttctacgttccgtcagaagtttatgagcatttcgctgcagctgttaaagaatcaggtgagaaaaaagaacaagaatggaatgctcaattcgctaaatataaagaagtttatcctgaacttgctgaacagcttgaactggcaatcaaaggagagcttccgaaggactgggatcaagaggttcctgtgtatgaaaaaggaagcagcctggcatcccgtgcatcttccggtgaagttctcaacggacttgcgaaaaaaattcctttctttgtcggaggttctgctgacctagcgggatcgaacaaaacgactattaaaaatgccggtgattttacagcggttgattactcaggcaaaaacttctggtttggtgtacgtgaatttgcgatgggtgcagccttaaacggtatggcgcttcatggcggtcttcgtgtattcggcggaactttctttgtcttctctgattacctgcgtcctgcgattcgccttgcagcgttaatgggccttcctgtgacatatgtcttcacacatgacagtattgcggttggtgaagacggtccgacgcacgagcctgttgaacagcttgcttcactccgtgcgatgcctaacctttctttgatccgtccagcagacggcaatgagacagcagcagcatggaagcttgcagtgcaaagcactgaccacccaacagcgctagtgcttacacgtcaaaaccttcctaccatcgatcaaacagctgaagaagcattggcaggagtagaaaaaggtgcatatgtcgtttctaaatctaaaaacgaaacacctgacgctcttctcattgcctccggatccgaggtaggtcttgcaattgaagcgcaggctgaattggcaaaagaaaatatcgatgtttctgttgtcagcatgccttcaatggaccgttttgagaaacaatctgatgaatacaaaaacgaagtccttcctgcagatgtgaaaaaacgtcttgcaattgaaatgggctcatcatttggatggggcaaatacacagggcttgaaggtgacgttctcggcatagaccgattcggtgcatctgctccaggtgaaaccatcattaacgaatacggcttctcagttccgaacgtagtgaatcgagttaaggcattaatcaataagtaagcttttgaaagaggatgagtcaaatcatcctctttttcttgtttatccgacaaaaatagtattggctgtttaacagtaatagacaattctttcttttcttcttttgtataatagagagcaaatgaaatgctgctggaaaaggggatgaaaagatggaacgtcactactatacgtacctgatcaaagaggaatttgccaatcactatttcggccgggaatcggttatgtttgagctgtttcaagactatcattggacaagccttgaaaagcagcagtatgaaatgacagagaaacagattcaatatattacacaaccaatcccgattttacatatgcatcagcggttaaaaatgaatttaaacaagacggattacaggcagctggattatatttatagaatagctttgccgaaagcaaaaggccacgcgacgtttatgatgaaggagcacatgatagaaattgtggcttcgggagattacgaggcagaaacgatattctttgaagtgttaagaaaagtaagcccttgctttttagcaatggatttcaattcgaagcgttacggatggctaaatccggtgaaagaaagaaattttgtctaaaaccgaagaaaaagagatgtaaatgttgtataatagcttttggtttagtacactttaaactagacaacatgaaggaggaaataaaatgactttatgggttggcatcctagtgggcgttgttgcattgctcataggtgttgcactcgggttttttattgctcgtaaatatatgatgagctacctgaaaaagaatccgcctattaatgaacaaatgttacgcatgatgatgatgcaaatgggaatgaaaccttctcaaaagaaaatcaatcaaatgatgaaagccatgaataatcaaacgaaataatacgtaaagattatgatatagagaaacatggttataaaataaaaaacccttatacgggttttttattttgcaatcattcatcacccgctactgctcgaaggcgctgcttttgatattgtatgagaagatggtcaagctcctgactgagctctatcgtaatatgagatgtcattccgttcgccatgacaatttgcagcagctctgctctttttttttcaatttcttttaatagatgctctctaatcacagggatgtatcctttcatacattagatcttcaaagtgaatgtttatattatatccatatttatactaattttcaaatgagaaggagtataatgtctcaatgtcaaattaaattatataagttttttctgaaaatagaaatccttcaagtgaaagtgttaaaaaaatgaaatgattttgtcataacttgaaggaatgtcaaatcatgaagggatgatgacatgggagacgtgaattattttttgacattcggtgcgggttttttatcctttatttcgccttgctgcctgccgctttacccagcttttttgtcatatattacaggggtcagcatggacgatgtaaaaacagaaaagctgctgctgcagaaaagaagcctgtttcatactttgtgttttttgcttggcttttcagtcatttttattgctttaggctatggaacatcttttattggcagcctgtttagggattatcacgatgcgattcggcaaattggcgcgttgcttattattttgttcggtttcattacactcggtgtgttccggcctgaggctatgatgaaagagcggagaatccattttaagcataaaccaagcgggtttttaggatcggtcttaatcggaatggcatttgcagctggatggacaccatgtaccggtccgatattaggtgctgttatcacacttgcaggcaccaatccgggctcagcggtgccatacatgatgttatatgtactcggtttcgcggtaccgtttcttttattgtctttttttatcacaaagctgaagtggataaggaagaaccagcttttcattatgaaagctggcggcgttttgatgattgtgattggtgtgctgttattctttaattggatgagcctgatcattattttgctgtcagatctttttggaggctttactggtttttgacggtaaattactttcgtactactactaatccttttgtttttggtacaataagactattatctgtggaaatcgattgttggaggggaatatgacaagagttttagttgtagacgacgccaagttcatgagagtgaaaatcagagagatcttggaagaggcaaattacataatcgcaggcgaagcggcggacggtgaacaagcagctgacctgtataaaaaactgcgcccggaccttgtgacaatggatattacaatgccggtgaaaaacggcataaaagcgcttcgtgatatcttaacctttgatcctaaagcgaaggtcatcatgtgcaccgccatgcgccagcaaagaattgtaacggaagcaattgagctgggggcaaaggattttattgttaagccgtttgaggaaacaaaagtgctggaagctgtaagccgcgttatgggacattaaagtcatttcttttcaaaatggttttttttattgttttggagtatagtatatagtatcaacactccgagaaacaaaggaatgataagtatgatgattatagtttcatcgattattgctgtgttaatggctgtagctgtgatggtggtcagaataaagtcctctgacaagcctgtttcaccaaaaaaaatcattctcccgccgatttttatgagtacgggagcgttaatgtttttatttccggtattttgggtaactggtgcagagtttttggaagcattcactttaggtgtgattttctctatttttctaatcaaaacttctaagttcgaaattaaaaataatgaaatttacatgaaacgctctaaagcatttgtttttatattagtcggtcttttggtgatcagaatcgtgatgaaatcgatcttgagcacatcaattgattatggtgcactgagcggaatgttttggattctggctttcggtatgattgtgccttggagaatcgccatgtatttatcatatcgaaaacttcataacgagctgcagtcatctaatattcaaatgaattaaaaaacctttcctcttgtcaggaaaggttttttatttgagaagggtctgataaggttccaaatcgatttttttgtcccgcagatgcctttttaagaaggtatggtctcttttaggagttgcgagaatatagcctttgatcataagttgctgatcaatctttgctaccttttcttttaatgcaagctcaccgattttgcctgcgattttagcttttgctgcatctctgaacagctctggcacgggcgcagtcaattcatctagaaactgtttgttttcatcgttccataaatgtctgctgttttcaatatagtaatcctgccaatcaagctctgatctgccgtcctcttttggtaaacgctttaaaaactttcgaaacatgaaaaaaccgccgattgataataagactaccatcatgatcacccaaaacagaataaaccataaaaaccatccttccagcatcaatcattcccccttattctaaccatattgtatacgaagagagattagaagaacacagtaaaaaaagaatagaaaaaagtgatagacgtctagtcaaaagagatagtagatcatattctattgtatagtgaatctgctatttggccatgggagagtcactagagggtatttgacgataaatggacggaaaaaaaagtcactttcataataggggatgaaagtgactttttatgtttagctgagaggaaattgaagagaaaaagaagagccatcttctgtttctttattgacggcgactgtgagtatttgattttcgcattcggcttgaatggttttgtcattaaaataaaaaggaagcatcatttgtttttcaaaagtctgtcctgacgatttgactgttaagatgaactcgcatccagaaagggtaactgttacttgtgtaggctgtaaaaaagtcagatccgcttctataatatactgctgacttgtttcatataaatcaataggcaatgtttcgtcgtaccaggcgaaggggtcttcaaaaaattgccgaagccattcatccatactatcgaaatcattcgcatcgttgcgttttgaatggttcatggaagcattcctccacatatcaaccttgctttacatcatatgcggtggattataaatgggtgaacgcataaaaaaacagacactaaggtctgcttttcttacatatcatggcttgagttgtgcttttgtcttgtatggtttcggttctttacttttttgcttccgcttagaggctcaggttggccgggattgtgtcctttaggggcgtttttatgcatatctttacttgtattcttattggtcataaaatgagaacctccttaaaagagttcggtgttattgattggtttttctttttttgttattttggcgttctgcttcagtcagtacaagctggtcgttttcaatatagccggcgcctttgccttggctttttgcgtcattcattccgttaatgacgtgattcgcttttcttttgaccatcattatcacctcaatcataatatggcttcttttattgtgttatatgagagagcgtaaacagtaaaaattaccggtacatttttctcataagtcgaacttattgtatttaataaaaacattgatatttacttatgtatgattttgttttaatatgaaattgtgagaaaattgtgatggaatgtaatgttcatctgagaatgatctgatctgaagggggattttggagaatggcaaacgagcaaaaaactgcagcaaaagacgttttccaagcgagaaaaacgtttactacaaatgggaaaacatatcattactactctttaaaagcgttagaagattcaggtataggaaaggtttcgaagcttccttattccatcaaagttcttttagaatcagtattgcgtcaagttgacggcttcgttatcaaaaaagaacacgtggaaaatttggcaaaatggggaactgccgaattaaaggatatcgacgttccgttcaaaccgtctcgtgttattttacaagacttcacaggggttccggcagtagtagatctggcttcactgcgtaaagcaatggcagctgtcggcggagatcctgataaaatcaaccctgaaattcctgttgatcttgttatcgaccactctgtacaggtagataaagcgggtacagaagatgcattagcagtaaatatggacttggaattcgaaagaaatgcagagcgctacaaatttttaagctgggcaaagaaagcgtttaacaattatcaggcagtaccgcctgcaacaggtattgtgcaccaggtcaaccttgagttcttggcaagtgttgtccatgccattgaagaagacggcgagcttgtaacgtatcctgatacgcttgtcggaacagactcacacacaacaatgattaacggtatcggtgttctcggctggggtgtcggtggaattgaagctgaagcgggaatgcttggacagccttcttacttcccagttccagaggtaatcggcgcgaaacttgtcggcaagcttccgaacggaacaacagctactgacttggcgttaaaagtaacacaagtgctgcgtgaaaaaggcgttgtcggtaaatttgttgaattcttcggaccgggaattgctgaactgccgcttgcagatcgcgcaacaattgcgaatatggctccggaatacggtgctacatgcggattcttcccagtagatgaagaagcgcttaactacctgcgcctgactggccgtgatcctgaacatattgatgttgttgaagcatactgcagaagcaatggcttgttttacactccagatgcggaagaccctcaatttactgatgtggttgaaattgacctgtctcaaattgaagcaaacttatcgggtccaaagcgtcctcaggatttgatcccgctatctgctatgcaggaaacgtttaaaaagcaattagtcagccctgcaggtaaccaaggattcggtttaaatgctgaggaagaaaataaagaaattaagtttaaactccttaacggcgaagaaacagttatgaaaacgggtgcgatcgccattgctgcgattacaagctgtacaaatacatcaaacccatacgttctgatcggcgccggactggtagcgaaaaaagcggttgagttagggcttaaggtgcctaattacgtgaaaacgtcacttgcaccgggttctaaagttgttacaggatatcttgtgaattcaggccttcttccatacatgaaagagcttggctttaacctcgttgggtacggctgtacaacatgtatcgggaactcaggtccgctttcaccggaaatcgaagaagcggttgcgaaaaatgatcttctgattacgtctgtcctttccggaaaccgtaactttgaaggacgtattcacccgcttgttaaaggcaactatcttgcttcaccgccgcttgttgtggcatatgcgctggctggaacggtaaacattaacttaaaaaccgatccaatcggtgtgggcaaggatggtcaaaacgtatactttaatgatatttggccgtcaatggacgaaatcaatgcacttgttaagcaaactgttacgccagagctattccgcaaagagtatgaaacagtatttgatgacaacaagcgctggaacgaaattgaaacaacagatgaagctttatataaatgggataacgattcaacttacatccaaaacccaccattctttgaagagatgtctgttgagccaggcaaggttgagccattaaaaggactgcgtgttgtcggtaaattcggcgattcagtcacaactgaccatatttctcctgcgggggcaatcggaaaagatacgcctgccggaaagtatttgcaagaaaaaggtgtttcacctcgtgactttaactcctacggctcccgccgtggaaaccatgaagtcatgatgagaggaacatttgccaacattcgcatcaaaaaccaaatcgcaccgggtacagaaggcggatttacgacgtactggccgactggtgaagtaacatccatctatgatgcatgcatgaaatacaaagaagataaaaccggtcttgtcgtattagcaggaaaagactatggtatgggatcttcacgtgactgggctgcaaaaggaacaaaccttctcggcatcagaacggtcattgcagagagcttcgaaagaattcacagaagcaatcttgtattcatgggtgtgctgccgcttcagtttaaacaaggtgaaaatgcggatacactcggcttaacgggtaaagaagtcatcgaggtagatgttgatgaaacagttcgtcctcgtgaccttgtgactgtaagagcaatcaatgaagacggcaatgtaacaacttttgaagcagtcgtccgctttgatagtgaagttgaaattgattactaccgccatggcggcatccttcaaatggtgcttcgtgaaaaaatgaagcagtcctgatgaatcaataggaagagaaggcatttcgctttctcttctttttataacacaatgtgctgcggaggtggcatatgctgaaaaaatggctcgcagggatcctgcttatcatgcttgccggttatacgggatggaatttatatcaaacatacagcaaaaaagaagtcggaattcaagaggggaaacaagcacctgatttttctttgaaaacgctgtcaggagagaaaagctctttacaggatgcaaaaggcaaaaaagtgctgctcaatttttgggcaacttggtgtaaaccgtgccgtcaggaaatgcctgcgatggaaaagctgcaaaaagagtacgccgacaaacttgcggttgttgcggtaaatttcacttcagctgagaaaagtgagaaacaggtccgagcgtttgctgatacgtatgatttaacattccccattctgattgataaaaaagggatcaatgctgactataacgtgatgtcatatccaacgacatatatcttagatgaaaaaggtgttatccaagacatacacgttggcaccatgacaaaaaaagaaatggaacaaaaactggatcttgattagattcagtttttttatgctcagatatgcttacaagttttcagaattggaaaaaataaaagaatatgcggaggtgagaagcgtgaagaagatgagaaaacgttcttttcatgagctcgtcatggaaaacaaaaaagagctgatgaccaatacagagtatttaaatcagcttgaggaaaagcttgaacagcgatttaagcaaaaataacctttaatttgtattcatgtttacccctccttttgagaaacctatctgttgaggagggataaacatgggaaacaacaagaaaaacggtcagcctcaatatgctccaagccacttgggtacaaagcctgtaaaatataaagccaataaaggggaaaaaatgcatgatacttcaggacagcggccgattatcatgcagacaaaaggcgagtagcgaaaattcgagtttatttctaggaggtacatccgaatgacaaagaaccaaaatcaatatcagcagcctaatcctgatgatcgctctgacaatgtggaaaaattgcaggatatggttcaaaatacaattgaaaatatagaagaagcagaagcatcaatggagtttgcttcaggagaagataaacagcgtatcaaagaaaaaaatgcaagacgcgaacagagcattgaagcgtttcgtaatgaaatacaggacgaatctgcagcgagacaaaacggataccgttcttaaaaaaccagggaaacctggtttttttctttctgatttgattatggtaaaatggggctaaattgacgttaagggagcagagtaatcttgcatgtatcaaaaaaagaaatagaagtgcgttatgcagaaacagatcaaatggggattgtctaccacgcaaattatcttgtgtggatggaggtcggcagaacggccttaattaaggacttaggctttttatatagtgatatggaaaaaagaggcgttctgtccccagtcgttgatatcaatatttcctataaaaagccgcttcattacggagaaaccgcggttgtacatacatggatagaggaatataacggatttaaaaccgtctatggttaccacatctataatccggccggtgagctttccatcaaagccacctcatctcatatttgtgtggataaagaaagctttaagccaattcaattccgcaaagcttttcctgattggcacacagcatatgaaaaggccaaaaaatagggaagtgaacgggatatggcgtttggtgtgaaacgggaggaacttaaccgatggaaacaagcagtgaaaagaggagaaatcgcatttttaacacattactggctggatgaccgatttccggaagcaaggactgtaacaaaagccggctgtgcagacattgataagctggttcagtggggggcggcgtacgggttaaaaaaagaatggatccataagaaaagtgaatttcctcacttcgatctgctgggggaaacacaaaaatatattttggaacaagaaaacctaaccgatcatcttatacgatttcatttgtaaaaaaagaacgcacatgatgtgcgttcttttttattggtattcaaaaaccggttcatcagcgtcttctgaatagctgacgagaaggtcgtggttatcaaagtaccataaatcactttcttcaataaagaaggtaatgccgtcagcttctgcagtgactccagcctcttgtggggcatctttcgctacaccgagagaaaaacccttttgaacgttgctgcagcctccatagcggacgaaaaagcgaacctggtctccgctttccaaatcgagttcttctttataccagttcaatgcgtcttcgttaattgtcatattcataacagaacacccctttgttcttcatttgaattttctctattataaacgtattaggctattctgtgtcaaaagagaagttttttaagcttataaccattttactttaggttctgttttattgataattcgtttaatgttcgctcggtgtctgtatatcacaaaaatagtgagcagggtaacgacaatcaataaatacgtatcatggacaaagaaactatatataacagtatagatccctgttaacatcgatgagagagaaacaaatttagtcaagtataaaaagatgaagaataccgcaaccatcgtgataaataacaggggtgcgtaaaatagcaaaacgcctcctgatgtcgccacggctttaccgcctttaaatttggcgaagatgggaaacacgtggcctaaaaccgcaaagactcctgcaagaagcgggtgaatatcaacatgcatgagaaaaggcaatgcagttgccagtgtccctttcaaaatatctccggctatgacgaccgaaccagcttttacacccaatgtacggaatgcattggtagcgcctaagttgccgcttccgtgctcccgaatatcaattcccttggcaagcttgcccacaattaagccagatggaatgctgcctatcaagtaggccaaaataatcaataaagcaattaacatctacatttctcctttttcaaattcccttctttttattttaacatgagatgtcatgatctgatgataagtttttttgtaaagtttgcttacaaatccaatcaaacatgcatcatattttgatttctcctgttttgatcgtgtaaaataagtaaaaaaggagtgacacacgatgcaaaacccttctaaagcggaaattaaagagattcttcaaagaagcaaacgtatagcggtagtagggctttcagaccgtccggatagaacatcacatatggtttcaaaagcaatgcaggacgcgggttatgaaattatccctgtgaacccgacaattgatgaggccctaggtgtcaaagccgtttcatctttaaaagagattgacggtccgattgacatcgtaaatgtattccggcgctcagaacagcttcctggagtggcggaagattttttagagacagatgcgccagtattttgggcacagcaagggctagttaatgaggaagcataccagatgctaaaagaaaaaggcagaacggttatcatggatctgtgcataaaagtggcacacgctgtaacaaaataggtgcagaactgcaaaaatccttgtaaattcaaggatttttgctttttaattttaagatattgtttgcgtattacggtgaaacagatacaataaagcttgaacagctttttttgaataccttgtccagctgggtttcggccgttcgatttgcgaaggtctgctgctttatatataataaacaaacatacgttcttatggtgtaaaaacagcactagccgatgttttgagaagaactgattcgttagctctatgttgcgattgcaaacatattggttataatgaggagtccaaggcagtactggctcgaggcgaggtttataaaaaatatcttatatacaaatgatgtgtaacactgaaaaagagaaagacaatgttagtttttgaaaggggtttgtacgtttggctagaaaacagcaatttgattacaacgaagatgccatacaggtgctcgaaggccttgaggctgtcaggaaaaggccgggtatgtatattggctctactgacgcgcggggtttgcaccacttggtttatgaaattgtagataactctgtcgacgaggtgcttgccggccatggagatcacataatcgtcaaaatacataaagacaatagtatttctgtacaggatagaggccgcggcatgccgaccggaatgcataagctcggcaaaccaacccctgaagtgattttaacggtgcttcatgccggaggaaaattcggccaaggcggctataagacaagcggcgggctccacggagttggtgcatcagtcgtgaatgctttatctgaatggctgacggttaccattgagcgggacggttttgtctatcagcagcgatttgaaaatggaggaaaaccggttacatctctcgaaaagatcggcaaaacaaaaaagacgggaactcttacacactttaagccagatccaacgatgttcagcacaaccacttataattttgaaacgctctctgagcgcttaagagagtctgcgtttttgttaaaaggactgaaaattgagctgattgatgaacgcaatgaccagcatgaggtcttttattatgaaaacggcatagaagcgtttgttgcttacttaaatgaagaaaaagacgtcttgtctgaagtggtctcgtttgagggtgagcatcattctatagaagtggactttgcgttccagtttaacgatggttattctgaaaatattttgtcgtttgtcaacaatgtcagaacaaaagacggcgggacgcatgagtcaggtgcaaaaactgcgatgacgcgtgcttttaatgaatatgcgcgaaaagtggctttgctgaaagaaaaggataagaaccttgaaggcaccgatataagggaagggctttcagccattatttctgtccgcattcctgaggagcttcttcaatttgagggacaaacaaaaggaaagctcggtaccagtgaagcaagatcagcagttgatgcgattgtttcagagcagcttgcttactttttagaggaaaatcgggacaccgcaacgcttcttgtcaaaaaagcaatcaaggcgagccaggcgcgcgaagcggcacgcaaagcccgtgaagaagcaagaagcggcaaaaaacgaaaaaaatcagaagcgactttaagcggaaagctgacgcctgcgggttcaagaaacccggcaaaaaatgaattgtatctcgttgagggagattcagcaggcgggtcagccaagcagggaagagaccgcagattccaagcggtactgcctttacgcggtaaagtcattaatacagaaaaagctaagcttgctgatatctttaaaaatgaagagatcaatacgatcattcatgcgatcggcgggggagtcggggcagatttctcaatagatgacatcaactacgacaaaatcatcattatgaccgatgccgatactgatggcgcccatattcaagtgctgcttcttacctttttctatcgctatatgaaaccgctcattgagcatggcaaggtgttcattgcgctgccacctttatataaggtcagtaaaggaagcgggaaaaaggaaatcattgaatatgcatggtctgatgaagagatgggtgatgtcctgaaaaaagtcggcaaaggctataccattcaacgatataagggtcttggagagatgaacgcagaccagctgtgggaaacgacgatgaatccggagtcccgcacacttgttagggtcaaaattgacgatgcggcacgtgtagaaagacgtgtgacgacgttaatgggagacaaagtagagccgcgcagaaagtggattgagaaaaacgtcgctttcggcttagatgaagaaagcaatattttagaaaatgaaaacttatcggtcgctgaggaggtttaatgattgtcacagccagaattatttcatgatttaccattagaagaggtgatcggcgaccgttttggacgctacagtaaatatattattcaagacagggcgctgcccgatgcgagagacggattaaagccggtacagcgcagaattctgtatgcaatgcatacagatggaaacacgtttgataaaaacttcagaaaagcggccaaaacggtcggtaacgtcatcggtaactatcatccgcacggtgacagctcggtttatgaagcaatggtgcggatgagccaggattggaaagttcgtaatgtgttaatcgaaatgcatggaaacaatggaagcatcgacggagatcccccggcagccatgcgttatacagaggcacgattatctccgattgcatctgagcttcttcgggatattgacaaaaacacggttgaatttgtgccgaacttcgatgatacaagcaaggagcctgtcgtactcccggcgatgtttcctaacctattggtcaacggatctaccgggatttcagcaggatacgcgaccgacattccccctcatcatctgggagaagtcattgatgctgtcattaagcgtattcaaatgccatcttgctctgttgatgaacttatggaagtcattaaagggcctgattttccgacaggcggtattattcagggcgttgacgggataagaaaagcttacgaaaccggaaaaggaaaaatcattatccgcggaaaggctgaaattgaaacaatcagaggcggacgagaacaaattgtcattactgaaattccatttgaagtaaataaagcaaaccttgtaaaaaaaatggacgagttccgtattgataaaaaggttgaaggcatctcagaggttcgtgatgaaacggatcgaacagggctgagagtggtcattgaactgaaaaaagaagctgatgccaaaggcattttgaatttcttatacaaaaatactgatttgcagatcacatataacttcaatatggtggctatccataaccgccgtccgatgctgatgagcctgccgtctattttggatgcatatatcggacaccaaaaggaagttgtcacaaaccggtccgtttatgagcttcaaaaagcaaaagacagacatcatatcgtagaagggctcatgaaagctttgtctattttagatgaagtgattgcaacaatccgttcttctagcgataaacgtgacgctaaaaacaatttgatcgcgaaatatgaatttacggagcctcaggctgaagccatcgtgtcattgcagctatatcgtttaaccaatacagatattacagcgcttaaggaagaggcagaagagctcggtaaaaaaattgaagagctcgaatctattctgagcaatgataaaaaactgctaaaagtgattacaaacagcttaaaagcattgaaaaagaaatatgcagatacgagacgctccgtgattgaagaaaaaattgaagaaattaaaatcaatctcgaagtcatggttgcatctgaggatgtatatgtaaccgttacgaaggatggttacctaaaacggacgagccagcgctcatttgccgcttccaacggtcaggacttcggaatgaaagatacggacaggatgctgcatcagtttgaaatgaatacgacagacgtgctgctgctctttacgaacaaaggaagctacatctattgtcctgttcaccagctgcctgatatcagatggaaggacatgggccagcatttttcaaatctgatcactattgaccgtgatgaaacgattgtaaaggccataccgataaaagaatttgatccgtcggcatatcttctattctttacgaaaaacgggatggtgaaaaagacagagctcacccattataaagcacagcgttattctaaggcgcttgtggccttaaatctgaagggtgaagatgaactgattgatgtacatgtaacaaatggggaaagccagatctttatggccactcacttagggtacggcctatggtttggagaagacgaagtgaatgtagttggcgcacgtgcggcaggtgtcaaagggattaacttaaaagaggatgactttgttgtctccggtgagatccttcagcaatctgattcaattgtcttgttcacacagcggggagcggtaaaacgcatgagtctttctgagttcgagaagacatcccgcgcaaaacgcggtgtcgtaatgctaagggaactgaaaaagaatcctcaccgtgttgtagcactgttcgcttgcggtcttgaacagcgactaatggcagaaacagaaaaaggcgacagaaaagaactgcaggcaaaagagttgcggacaaacgacagatacagcaatggctctttcttttttgatgaagaggaatcaggcaaggttacagctgtttggcgacttcatacagaacaataataaaaaacccgctcatatagtatgagcgggtttcgtttgttttttatcagctttcatggttggtgaatagatctgttacagcatgaatgacttcaatcccctgccatacaaataaattcagcgctgtgaaagaaaataagcctaaaatcaccattcttaagataaacaacatgtttaacagcctcctcatattttcgttacataatcgggtgatgttgaacatgaagtttgccgaaataagacgattgataaaatttggccagtataaagctttttttccgctgacgtctgcgggagtatcccgtacttttgctttcagcggtcagcagcagaacagccattgcccataaagcggtcagcgtaaatgcccctgtgatggatttcttctcatcatcagcattttggccgactttcatctcatgcatttcctgctggtcggctacggctttataatgatggccgatatcaaaggcgtggggaattgagaacaaatgaaaactggcaatcgccaagaataagatggatgctttcaatatcgttacttttttcaaatgatctccccctcctttaatattactgaatatttttataataataccccaatccatcctaaaagtaaacgtgatttattaaatttaaaaataaatttaaccttgttaagtatatatctttttgcttatttttgaaagagaaaacttcttttattagcgtatgtatacccggtttatggtgtgaataaaaacatattttaaatgatatgtttgttgtttagggtttattactttatttatgtgttaaatcaaagggaaaggcaagagaatgggaagaaatgattacattgttaatagggcactcttttttaaaagccagcttgcaaggaatgtttttattcgtaggaaaataatagagaaggggtcgacagagtaacatctggctacgacaatattcttctcgaaaaaacttcctaattcgtcatattgtgatataataaaactcgttatgttaaaaaatctaacatcaaaatcgaattcgtgttgaattgatgaaaacgggaggtaaatatggagtcttttttcaatagtttgattaatattccaagtgatttcatctggaaatacctattttatattttaatagggcttggattattttttaccatacgttttggttttatccaattccgttattttattgaaatgttcagaatagtaggggagaagccggaaggaaataaaggtgtttcatctatgcaggcattctttatttcggccgcatcccgagtcggcacagggaatttgactggtgtagccttagcaattgcgacaggcggaccaggcgctgtattttggatgtgggtagtagctgctgtaggtatggcttcaagttttgttgagagtacgttagcgcagctttataaggtgagagacggggaggatttccgcggaggcccggcctactacattcaaaaaggtcttggagccagatggcttggcatcgtttttgcaatcttaattaccgtctcattcggcttgatttttaacgctgttcaaacaaatacaattgctggagcattggatggcgcattccatgtgaataaaatagttgtagccatagttctggcggttttaactgcgtttatcattttcggcggtttaaaacgtgttgtcgctgtttcacagttaattgtgccggttatggcaggcatttatattcttatcgctttatttgttgtcatcacgaatattacggctttccctggcgttatcgctacaattgttaaaaatgctttaggttttgaacaagtcgtcggcggcggaataggcggcatcatcgttatcggtgcgcagcgcggacttttttcaaacgaagcaggaatgggaagcgcaccaaacgcggctgcgacggctcatgtatcccatccggcaaagcaaggctttattcaaacattaggcgtatttttcgatacatttatcatatgtacgtccacagcatttattattttgctgtacagtgtaacaccaaaaggcgacggcatccaagtaacacaggctgctcttaaccatcacattggaggctgggcgccgactttcatcgcagtcgcaatgttcttgtttgcattcagttcagttgtcggcaactattattatggcgagacaaacattgaatttattaaaacaagcaaaacatggctgaacatttaccgtatcgctgtaattgctatggttgtgtatggatctttatcaggcttccaaatcgtttgggatatggcggacctctttatgggtatcatggcgctgatcaacttaattgtgattacgctgctgtcaaacgttgcttacaaagtgtataaagattacgcgaaacaacgtaagcaaggacttgatcctgtgtttaaagcgaaaaacatcccagggctgaaaaacgctgaaacatgggaagatgagaaacaagaagtataatataaatataatgaaaaagctgcattcaatagttgaatgcagctttttcattattggaaataaatttaatttttcgactcgaatgaaaaatgacgtgtaaagtcccaattcagtccagttttctttgttctatatgtgtcatgtgtgtcttattcattggaggtagagcaaattgacaggcttttaaacctcccaaaaacaagaaattaggttgatagacaatcatgagaaagatttttacaatgagttcgtgctcataagaagtgtagagccaaaatgatgcgaaggaggaaaagatcagatatgaaacggtcaatctctatttttattacgtgtttattgattacgttattgacaatgggcggcatgatagcttcgccggcatcagcagcagggacaaaaacgccagtagccaagaatggccagcttagcataaaaggtacacagctcgttaaccgagacggtaaagcggtacagctgaaggggatcagttcacacggattgcaatggtatggagaatatgtcaataaagacagcttaaaatggctgagagatgattggggtatcaccgttttccgtgcagcgatgtatacggcagatggcggttatattgacaacccgtccgtgaaaaataaagtaaaagaagcggttgaagcggcaaaagagcttgggatatatgtcatcattgactggcatatcttaaatgacggtaatccaaaccaaaataaagagaaggcaaaagaattcttcaaggaaatgtcaagcctttacggaaacacgccaaacgtcatttatgaaattgcaaacgaaccaaacggtgatgtgaactggaagcgtgatattaaaccatatgcggaagaagtgatttcagttatccgcaaaaatgatccagacaacatcatcattgtcggaaccggtacatggagccaggatgtgaatgatgctgccgatgaccagctaaaagatgcaaacgttatgtacgcacttcatttttatgccggcacacacggccaatttttacgggataaagcaaactatgcactcagcaaaggagcacctatttttgtgacagagtggggaacaagcgacgcgtctggcaatggcggtgtattccttgatcaatcgagggaatggctgaaatatctcgacagcaagaccatcagctgggtgaactggaatctttctgataagcaggaatcatcctcagctttaaagccgggggcatctaaaacaggcggctggcggttgtcagatttatctgcttcaggaacattcgttagagaaaacattctcggcaccaaagattcgacgaaggacattcctgaaacgccatcaaaagataaacccacacaggaaaatggtatttctgtacagtacagagcaggggatgggagtatgaacagcaaccaaatccgtccgcagcttcaaataaaaaataacggcaataccacggttgatttaaaagatgtcactgcccgttactggtataaagcgaaaaacaaaggccaaaactttgactgtgactacgcgcagattggatgcggcaatgtgacacacaagtttgtgacgttgcataaaccaaagcaaggtgcagatacctatctggaacttggatttaaaaacggaacgttggcaccgggagcaagcacagggaatattcagctccgtcttcacaatgatgactggagcaattatgcacaaagcggcgattattcctttttcaaatcaaatacgtttaaaacaacgaaaaaaatcacattatatgatcaaagaaaactgatttggggaacagaaccaaattagttaagcttttttttggcggacatcagtaacgatgtccgtttttatcatctaataggaggtttgcgttgtggatgaaatactgaaacagtatatggtgctgtataaaaaaatgagtaatatgataaatggtcccgactatccaggtaaggaaaaagacatccagcatcaaaaagatcagatcgaagtttacgaaaaacagctgcagcaaggattttctacagattatgactatgatgtgtttgctgattctgttatcaaatgcgcatatggcgatatgacgctggaagatttagaagccgtttattatggattgacaacaccatttttttgatttgtcattcagcagtaaaatttcaatttctgtctcactaacttaagtatactttgatattgagacagaaatttatttattttgtttacttcctagaatatatattatgtaaactagaaaagatgaagattaaagctttgctgtttttatgtacatcctttcttcttcctgtaattcagcaacaaaataaaaaagcgatttcccaatcggaaaatcgccaattcagacactctattatttatgagtgtctttgtgctcttaacgatttacaacaaatgttgttacgctttgagctggaagatgggcccaaaaatgattgcctgatacagtgagattcgttccaggttgtagattgctgctgctgctcgtgatccatctagatacgtttgaagcagatccattctgcaaaacaaagttttggttgacccctgtgttgcttttattgatagcaacaataacgaccttgttgtcacctttataggctgacacgtaaacgttcgcattagggtttttcgttgcatcaatccttacatagccgggacgcacaaactttgagaaatgagccatattgtagccgcgtttgctgatcgtaccatcttctttcataggtccatatgatcttcgaatgtaccaccatacataagcttgaaagtccccctctaccatcgcattgtgaatatgctgtgaaacatccaatgcctcaggccatcgatccgccgagttgttatcactgtttggatagtatacttccgtcatccaaaggtccttccccgctcctttttgtttgaaaagaggataagggaattggctgacctgggtgccgtacaggtgagttccgagaatatccatattggcaagagcctgcggatcgttcaagatcgggtccgacaaattcttcaagtattgaaatgactcaggcgcaatgacgcgggcattgatcgagccggcgttttctctcataaagcgaagtatttcttgcggcgtccaccacgtccactcgtgagcgtaatcaggctcgttttggaccgaaatcgcgtaaagattcacaccattattcttcatgaaggtaacaaaatcgttaagatgctgcgcgtatgctgcgtacttgttgtatttcagccgcttagctgatgtgtcaccattccgattgaaggtctcaaccatatcacttggaggattccagggagatgcaaaaacgattgccccatgtttgaccgcactcttggcagtctccacctctttataccaattatttcgattttcatctacatgaattcttaagattgaaaatcctaactggttctgtccattgccaaaagcagtttctctttgagctgctgtaagatccccagcccaagcgggatgattcatccctccaaaaccgcgaatcacttgtttctctgcagatacattaactgttacatcactggctgccaaaacttcagtagcgcctggccctaacatgactgacagcatagtgaaacatactaatagtacacaaattgttttttttatgcgtggaatcatttattcctctccttcgtcatgtgtcttttacggtattaaaaaatctgcatggcatatccataatggcgggctgttccggtgatggcccgtacttcacccgcctcgtttttaagcggtcccattacgagtcctatctttgcgtaaactgccagtaatcaaaattaaacaagtttcctgtacctgttccggtaaatacaaagaatactttgtgcacaccggttgccccgcttacttcagtttctatttctctccacgtttgcgctccacctgtggaaggtacattcagagttccaacaagcttaccatcagcactgtcgaggcgcacttctatttttccgcctaaagtggatgctacatttgctttaaatgtcctggcaccgcccgctccgaagtctgcatttcctacagcaatccagtctccattttgaatgcttgttacatgctgattatttactggcccgccgggtgctgtggacttctctgtcaaaatgcgtccattccaagcaaacgtttcagcttctacccggttataaggattcaaattggaaagctgtgttacacctgcataatttgctgctacctcttggatggatccatctgggttatgcaccagcttattaatatggggagaacggtatcctttgccggccccgaacagagcggaactgacagtttgcgcatggtacaccacataccactcgtttttaaaattgaaaacagcatgatggttgtttccgccgcctccgaaaaatgcacccggatttttcaggaagtgccctctatatgtaaaggggcccatgggacttgaactggtcatgtagccgatctcacccgggggtttatcggccggatgtgtgccgccgaaattgatgcaataggagtaataatatgttccgttatacttgtgcaatccggaatcttcaaacatgaaaggcgcatcaattgtagatgcacttccctcaacactcgtcatatcaggccctaattttatgacccttgccgttttaggattggcccattgtccctgcgttggatttgaaccgccaggaacgcctccgccggcatacaggtaaccggttccgtcgtcatctacaaatactgccggatcaaaaagccatacaacacctgacattcctggcgtacttggcgttacgagcggttttccgattgggtcggtccatggaccaatcgggctgtctgcggtgagaaccccgatacctccgccgctgtttgcgaaataaaggaagaatttatccttgccattaatttttttaactgcgattgacggtgcccaggatgcacctgcccattttgcaattccacggcctccattagctccattggcacctgctaccggaatggctccgtggtctgtccagttcaccatatccgctgaagatatgacgaatactctattcaaattggcaaatgaattatctttaatcgttccgttgctattatattcatagtcatcacttgacatataaatgtagactcttccgttataggtcagcgcaatcggatctgctcctaaatgatggtcgataagcgggtttgaattccctatatgttttgcaattgtagtacttgtggcagcatacgcagacttcccagataagcagctcaataataaaactagaatccataaacatacgctacactttttcctcatcacttcacatcctcctttttctttaaaatgggggattttcttttggaatttgatgacaacaggtcacgaagattgcacgcataaagtagccggaagctgtttagcaatgttcccagttgttctgaaagctcatcttcatgtgtctccattctctcttttcttcgaggagatcgcaccactccttcaaaattgttcaaaaaaactttcccattcctagcgaccattgtccagaaaataaaaagacaggattgttcatggcctcccactaatcacattgaacggagattacatcattatccaagatatccctttatctaacatcctacatcattaaaaaaattgtgtatagaaacttttggaggagttagtgttcgattctacaaaggaactggatacatttattcattgataagatggggctaacactccttttatatttttatgtaaagatagttttcagacacaaaaaaacagccgtcaatgcggctgttttttcaagagtataagaactattgagcggtatacccgctttttcatgttttgttcatattttattaattgtttattcaacactgtccgctatagtaatccatatcaacaaatatgactgccactcgcatcttttatgaagggaggttcgttacgctgaaagaaaaaataaagacattaggccgtttttgcaccgtaggcgtcggcaatacgctgatagattttggtgtcttctttcttcttaccgcttgtcatgtctcttatctgccggcgcagatctgctcctatactgcaggtatcgtcaacagctatgtgtggaaccggaattggacgttttgtgtgaaaggtaaggctgacgggaaagagatcgtgcgttttctcatgattaatattgccgcgtcggggatcacctttttgctgctttatttgtttcaaaattgcggctgctcgcttttggtgagtaagctcgccgccactatcggcggaatgatgatgaattttatcggaaaccgaatctgggtatttggagattcgctgaaaaacatacaggatcaggagtgaagatgaatgagaaaaaaagtgagaaaagcggttatacccgcagcgggtttaggaacgagatttctgccggcgacaaaggcgcagcctaaagaaatgctcccaatcgtcgacaaaccagcaatccaatatattgtagaagaggccgcagagtcaggaattgaagatatactgattattacagggagaaacaaacgctcgattgaagatcattttgatcggtcggcggaattggaattcaatctccgggaaaaaggcaagacggagacacttaaggaaatgcagcagattgccgatttggccaacattcattacatccgccagaaagaaccgctcggattaggccatgcggtgctgtgtgcggagcattttatcggagatgagccttttgccgttctcttaggtgatgatattatggtgtctgaaacaccggctcttcggcaattaatggatgtatatgacgtttatggcacagaggttgtcggtgtacagtcagttctccctgaggatgtcagcaaatatggtattataaatacatcagggtctcaagggcatgtatacgaagtgaacgatttagtggaaaagccttctcctgaagaagcaccttcggaaatcgcagtaatgggacgttatgtgctgaattcttcgatcttctccgttttgaagacaattggcagaggcgcgggcaacgaaattcagctgacagatgcgcttcgtgaggtttgccgtaaggagccgatccatgcccggctgctggaaggaaatcgatatgacattggcgataagctgggctgttttaaagcgagcaccgaaatcggcttaatgcgtcccgaaatgagatctcagcttttggcctatttagaagatgtgatcaaacgggaaacgaaagaaatgctgcggtaaaaaaattgtaaccatcttgctcgtcaatcagtcatataatagtgaaaaagattaggacaggttgtgaagaatgtgggcagtttgataagcgaaattttaacatggctgacgaacatgggatatgcgggtattgcgattgggttaatgattgaaatcattccgagtgagattgtattagcttatggcggctatatggtatcggagggcacgattggatttattggcgcaattattgcgggtgttatcgggggcaccattgcccagatctttatttactggatcggtcgctatggcggcaggccatttctggacaaatacgggaagtatttattgattaaaaagcatcatatcgatatgtcggaaaactggtttcagaaatacggcgccggagttgtcttctcggctcgttttataccggttgtcagacatgccatatccattccggcaggtattgccagaatgccttttctcaaatttgtggtactgactgtgcttgctatcattccatggtctatcctgtttgtttatttaggcatacagctaggaagccagtgggatgatgttgagaatatagcaggcacttatacaacaccgattatgatattggctgttgtcgtgatagccctttattttgtgattaagaaacgtacagccatatttaaacgatagctagcggatatgcataggggtgactgacgctcccctatgcatatttttttacttgcgatgttgatttgccagcttcagattctccgctaaaaatgcgacaaacacttcatcccgcacgagcgatgcggcataatttctcttaataaaccattctgcctcttcaaacgctgcgaatgtttcgtcttgggtttctccgttaatttgaatattccattcgttgtctaaagggaaaagaaaaaatctcatttgtgcgcgattttcatataatgatccattcgcagatccctttagattatagatgttacggaaggcatccggccgtacaggatcaatacggaaagcttcagctacaaacaactcgtatacttcatcggttattgaacagccggacgcttttgcatgccctccgccgccatatcggccggcgatttctgacacatcgatgtaatcatgaatggtgcggagactgactcgttttgaccccatgctcaaaatcgcaatgtaatcgaggtgcgggttatctttccctagcctgttccccagctctgaatggtacgattcagcgtgaacgatgcctacacagtgttcgtgaacaaaggtttgtaccatttcccttttctttctgcggaggtagcgctcgattttttcgtcttctaaatcaagcagtttttcttcaaaatcatcgaagaaaaattcgtcatgcgtggaaaggcgctggatcatttttgcttcaaattcatcgattgacagcaaaaagaaaagatcattaagccgcttcgcctgtttttgatcgtaccgctcccactcccatgtatcgtattggcggacgagctctgtgaattgatctaaggcgtttgtcggtttcatgaagccattttcaacgagatagccatataaaagcgatgtcgcggatgtgagccttccatcatcgtattccacctggacaaatccccattcatgctcattcaaatgaagggctgttttatgatggtctatgagcttcactttgccccctgcatgaacatactcattcaatctctcttcgttttcttcattgacggcgagatcggtgatgaataacgcgtcctgtctgttgctctccttcgctttttctaaaaagtactgcacctgtgcgtttaagccgttgacagagttataccggacctctacgtcttttccgaacgccaattttgctacgattccgcatcctactccgtccaagtcgttatgtgaatataaatgatacacaatgtaggcccctttttatgataaactgacaattgccgctagaggtgcggcagcctttatttactattctaaaaaaccaagcgttttatgcaatggtaattagttgacataatgttgttattgtaaatatacaaaggagcgctttttttgcgctcctaagttcttgcttttacaccggataaaccggatgctttcgattggtaaatgtcatttcctttgtcatgtatgccttgagccgtttggccagctcatcacgcagcgaattggctgggataacagcatcaatgatcatttctgaagccagacggtagatattgatgtcctctttgtattcctcccgtttgctgctgataaatgcggctctctcttcttctggcagctcggcgatttttttagcgtagacagcgtttacagcggcctcagggcccatgacggcgatttgggcggttgggagcgctagacagcaatccggttcaaatgccggccctgccattgcatacaaccccgccccgtacgcttttcggacaatgacagagagctttggaacagttgcctccgacatcgcagaaatcattttcgccccgtgtctgataatcccagcctgttctacttttgtgccaatcataaaaccggggatatcggctaagaacagcaatgggatatgaaaagcgtcacataaggtaataaacttagccgctttgtctgctgaatcgtggaataagacgcctccttttaccttcggctggtttgcaacaatgccgacaggctgtccgtggattcgtgcgaggcccgtcaataattccggtgcaaataaggctttgatctcaaaaaatgagtcttcatctatgacccgctcaatcagctcatgcatatcaaaaggtccgttttgattttgcggaatgacgtcggcaagcggagttttgaagtgttttggcgggcgtttctcatgaatgggcgctttttcttgaaaatttgccggaaagtaagacaaataagcccgcgccagctgtatggcttcttcttcagtttctgcaagaatatctccgcagccggagattgagcaatgcatacgggcgccacccatttcttcaagagacactttttctccaataaccatttccgccatccttggcgagcctaaatacatggaggcgttaccgtctaccataacgacgatatcacagaaggccggaatataagcgccacctgccgcagatggtccgaaaagcagacagatttgcggaatgcgtcccgataatttgacttgattgtaaaaaattcttcctgcaccgcgtctccctggaaagacattgatttggtcggtaattcgggcgcctgccgaatcgactaaataaatgagcggacagtttaatttttcggcggtttcttgaattctgatgattttttcaactgtttttgctccccatgaccccgctttcactgttgaatcattcgccatgacgcaaacggtttggccgccgattttgccgatagcggttacaactccgtcagcgggaagcccgtctgacatacattccgcaaaaaaagcgtcttctagctcaatgtcatcgtcaaagagaagggaaagccgctctctgacaaagagcttgcctttttcccgattgctttgatgatacttttccgctccgccttttcgaatccgttcagcccgttctgttcgttccttttcataatccatcagcattgcctcccttttatattcccttgtatacggcccgtcttttttcttgaaaggcctgaagcccttctctcctgtcttttgtcgggatggtttgttcatacgctttttgttcaatcgcaaggcctgtagcgagatctgtctccaatcctttattgattgcaaatttagcctgacggacagcgatcggtccgttggcagaaatggctgcggccagttcctctgcttttggcataaggtcacaaggagccgtgacatgctctacaaggccgatttcttttgcttcgtgtgcggtcacgcgtctgcctgtataaatgaattcttttgcttttcctctgccaatcagccggggcagcctttgggtccctccagcgcccgggataatagctaaccctgtttccggaagtcccagcacagctgattcagttgcgattcgaaggtcgcatgccaatgccaattctagtccgccgcctaatgcgcttccatttatcgcagctatgaccggctgcggcaaggcatcaagtaaagccgccgttctttgaatgagagatacactttccagaacctgatcttctttcagttttatccgttcctttaggtctgcccctgcacaaaacgctttttcaccggtgcctgtgaggatgacgcaacggatgtttgagttaaattcaatttcctggataatcatttgcaggtttctaagcatttccgctgaaagagcatttgctgcctgaggcctgtttaaggtgatcaacgcaatatgttcatttttaacagtaaaaagaatagaatctcccattgtatgcgtcctcccttttatcaagatgatttaaacacctgtaaatttctgctcggcagcggtttgcccattttttcttcaatccatttggccgcagatagcagtttttcgagctttacatttgttttgatatccatctgttcaagcatgtacacgatatcctcagttgcggcgtttcctgatgaacctggcgcatatgggcatcccccaagcccgcctgccgagccgtcgaacaccgtgatgcccatttggagtgctgtgaccatgttggccagagcggttcctctcgtatcatgaaaatgcagggcaatttgattagccgggaatcgtgccaaaagagcttcaagtacagtttccacttgggcgggattagctgctccaatcgtatctccaagcgacagttcagaaatcccaaattcaaatagagcttctgaaaggcgaatgacttgttcaatggggacatctttttcgtacggacagccgaaaacagtcgagaggtaggctcttgttgtgaggtttgctttttgtgcgtcgttgtttacttgtttgagtatatgaagggattcagaagtggatttattgatgttttttctgttgtgcgtctcgctggcggacataaaaacgcaagcctcgttaatgcctccttcaagtgcattctccagtcctctttgattcgggacaagtgccgcgtacgttacccctttttctcggtcgatgccttttgctacatcgatagcatctcgaagcgccggaatccatttcgggtgaacgaaggatgtgatttcaatatacgacagccctgtccgggaaagctggttgatccaggttattttatcctctgttgcgatccaaacgggctcgttttgtaagccatcacgcgggccgacttctttgattgtcacttttttaggatatggcatggtcttcctccaaattattgagtggaattgctcagttcgagcagtacgtctccttcatttacaaagtcgccttccttttttttgacttcttttacgattccgcttctatctgcaacgatcgggatttccattttcatcgattccaaaatggctacctcctggcccttttcgatttggtcgccggctttgacgtggactttccacaggtttcctgccatttgtatgctaaccgtcatgacaactgcctcctttataggtgttgtttcaaaaagtcagtcgtgacatccccttctttaaatgcctttgttgccgcagcctgtatgagaagcggaagatttgttttgattccttctacatggtagtcgcgaagcgctgtctccagtttttcaattgcttctgttctggactggcctttgacgatcatcttagcgatcatcgggtcataaaaaggggtaacaatgctgtcttttgctaccgcacattcgtgtctgactcctttatggtcagggagtgagaacgcagtgatcgtgcctggtgacgggtagaaggtcttggggtcttccgcgtatattctcacctctatcgcatgcccgtttcgtttgatgtctttttgagagaatgtgagtgtatggcccgcagcaattcgcagctgctgctcaactaagtccaggcctgttatttcttcagtcacggggtgttcaacttgcagtctcgtattcatttcgaggaaataaaaattttgcgtttggtcaactataaattcgatggtgcctgcgttcgtatagccgattgccttcgctgcttttaccgctgtttgcccgatcttcattcttagttcatcgtctacaaatggagacggtgcttcttcaatgactttttggtggcgcctctgaacagagcaatcacgttcaaacagatgtactgtatggccgtgttgatcggccaaaagctgaacctcgatgtgacgcgcatgttcaataactttttctatatacatcgacccgtcaccgaaaaaatctgctgcgcgctttttgtttccctcgtacgctttttttaatgcttcttcattttcaacacgctgcattccgatgccccctccgcccgctgaagctttcagcatgacaggatagccgatttgacctgcggtgcggcaggctgcctctatatctccgagggattcagaaacgcccggcaccacagggacaccagcagcctccattgcttttcgcgcttcaattttgctgcccatctttgcgatgatatcaggggaaggtccgataaacacgatgttttcttgcttgcagcgttcagcgaaccggctgttttctgataacaatccatatccagggtggatcgcgtcggcatttgcttttttcgccgtctttatgattctctctatatttaaataactttcactgactctcgattctccgatcaaataagcctctgtagcggcttttgtatggggcgcgtccttgtctgcttctgaataaaccgcgaccgttttaatgccgagacggctgcatgttcggataattctcattgcaatttctccgcggttggcgatcagtacttttgtaaacatgatttcacctcattgacttgatgataggttgaacatttcaatcgttttttctcgcagtttatatttttgaattttgcctgaggccgtcatcggatagtcatccgtaaaaataacataacgcggaattttgtggcgggcgattttccctttgcaataggctttaagctcatcaggtgaaacgcttttcccgtctttcagtttaatccaggctgcagcttcttccccgaatttggcgtcaggcacaccaacgacctgtacatctaaaacagcgggatgccggtataaaaattcttcaatttcccgcggataaatgttctcgccgcctctgatgagcatatcttttaatcttccagtgatgcggcagtacccgtcttcatccatgacagcaagatctcctgtaaacagccatccgtcatgattgattgcttttctggtcgcttctttgtctttataatagcctttcatgacgtgatagccacgggtgcacagttctccctgcatgcctctttgaacttcttgacatgtcccgggttctacaattttcacctcagtatgtggcagggcacggccggttgtttcgactcttcttatgaaggaatcatttgctctcgtttgtgtaatgactggcgaggcttcggtttgtccataggcgatcgtaatgtctttcatgcccatcctttcaatcacagctttcatcacttcacttggacagggagagccggccatgattcctgttcggagcgtcgatagatcatatgcatcaaaatccggatgatgcagctcggcgataaacatggtaggcacaccatggagcgctgtgcatttctctttttctaccgttttaaggacggtaacgggatcaaattcttgcacgggtatcatggctgccccgacggatacacatgccaaaaccccaaggacgcatccaaagcagtgaaaaaacggaacagggatgcacatgcggtcttgagaggttaaagccatacattcagcgatattagcagcgttattgatgacattgaaatgggtcagcatcacgccttttggaaaccctgtcgttcctgatgtgtattgcatattaatcacattgtctttatccaggctgttcattctctcttcaagctcagcatctgtcactgttttcgccaatatctctgtatcgtcccaatgatacatgccagacaatcgtttattgccaatatagatcagcgtttttaaaaagggatagcgttcagatttcagttggccgggctttgcttcttgcagttctggaattaaactgttcacgatgtctggataagaagtgcccctgtatgaatccatgataataagcgccgcggcatccgattgctttaacaagtaatcaagctcgtgtgcttgataattggtattgacggtcacgagcacggctccgatcttcgcagttgcgaactggacggcaagccattcagagatattagaagcccatatggcgacgtggtctccttttccaatccccatccgcatgagacctttagcggtttgacggcacagactgtcaaattgagcgtacgtatagcggatatttcggtctggatacacaacagcatctcgatcgggatacgcatcagctgtttgttccagcagcctgccgattgtggaatggatgagttcagccattcattgttcctcctttcttaatgataggaaagcgtttacatttttattttaaaagctgtctggcgatcacgagacgctgaatttcagatgtgccttcaccgatttccattaattttgcgtcccgcagcatccgttccaccccatactctttcatatagcctgaacctccatggatttgaatggcttgattgcaagctcttgtcgccatttcagatgcgaatagcttggcgtacgccgcttctttggtgaacgggcggttatgatctttcagccaggcggcttttaacaccatttgccgtgccagatcaatttccatcgccatgtcagcaagcttaaattgaatcgcttgaaatgaagaaatcggctgtccaaactgctttcgttctttcgcatatgccaatgatgcgtcaagggccgcttgagcaatgccgactgcaagagcagcgatggagatgcgaccaccgtccagcgtatatagaaactgtttaaacccttttgttggatcgccgagtaagttggccgcaggcactcttacatcctcaagcaaaatttccgctgtattcgaaccgcggacgcccattttatcgtacgggctcgtaatcgtaagtcctggtgtgtcagttggcacgattaatgcggagatgatgttttttccatctttgtttttgcctgttactgcagtcacaataactgtgcgtgcgtagcttgcattagtgatccagcacttttcgccgttgattacatactcgtcaccatttgaaatcgcttttgtttgagtgcctcctgcatctgagcctgcatttggctccgtcaggccgaatgatccgagtgctgtgcctgaagccagcggcgtcaaatgcgtccgtttttgctcttctgttccgaagtagtatagagggcttgcgcctagcgagaccgctgcagcatagcttaatccagtactgccgcaggctttgccgacttcttcaaccgctaaggcatatgaaatcgtatcaccgccagatccgccgtattcttctggaaatggaatacccatcagaccgagttcacccatttttttaaatgtttgcatcgggaactcgcctgtttgatctacatgttcagcgtgaggagcaatttcttttttcgcaaaatcttttaccatttcacgcaccatttgttgttcttttgtcagctcaaaattcacatcgtttcctccttcacatctttgtaacatcctattaggcgagttctataatcattccctgacaagaaaagtctgaaaattaaaactgaatcattttttatgtgataatatcagcgggatgagcaaatacatgcagtaggcgcataccatccatatcgtaaacgcaataacttggccctttgataaagccgggaagatgaggggaagattccaaagggaaatcgtatccatcaataaaccgaccgctgatccccatatacctagcttgatcaccgcgaactgtgattgatcgagtttttgatagagaaagaacacaaggcataaaacaagagcagtgcccgctcccaagagaagaaagttcggcaaaaaggcttcttcagccggatcagtcaacacagcatctccgaacagcacaaaaaataatgtggcacctaaccagactagaaatgaaaacgtaaaacacgtcctgtacgtgtttctcttcgattttacttagtactagtttctcagattccaataatggaaaatgtccaaacaccgcctccatattcatgtgaatctcacctttgttttttaaaaaaatacagcggtttaccatcgtttcctgtctccaaaatcactaaaaaagacgacttagaaagccgtccttctcatttcttattttgttgttcgtttggaagctttgctttcgttatgaagccggtctgctgaagtgacataatacgtatatttcttgttgggatctgccgtgttatctaagaaggtttgctgctcatgtgtttttctttgcgttgccagcaatgttctctgctttttcccttcggctctgtatatcgcataataggctgtttctttcgttttttgatttgatgggtgatctttaatctgcagaagattgccgtttttgtcttcggtgactttcgtaagcttcggtttttttggggcggtattgtcaagccaaggcatttgcggaaccagtgccggcttgctgtaaaggtcggcgataagcctgtctttgatgccaagcggatttttgttgagatccttgaggctgaaatgcatgcttcctttcaccagttcaagctggcggttcaaagtgatttgccgcacatattcctcagggtcggaccaaggcggatcaaaattgttattgattttatatgctgcctggccaatatataagtgaacaggcctatttttgacttcattgctccaccaatcagccagcacgtcgtacgccgctgcgttaaagccgatactccaataaatttgcggagcaatataatcgatgtcgccttcttggatccaatgtcttgtgtctgcatatagatcgtcataatttctgacgcctgcttttgtattcgatccggtcgggtcatctgctgcgtttctccatactccaaagggactgatgccgaatttgacatacggttttgcagctttaattgtttggttgatttgtttgacaagctggttcacattgtcccgccgccagtcatcgatattagaaaaagcgtcttttccgtattgttcgtactgtgcttgatcaggaaattcctgtcctgctattttataagggtaaaaataatcatccatatgaacagcatcgatatcataatgttttacgacttcttcaatgcctttgacgataaaatctctcgcttctggaatgcctggatgataatacagctggtttccataggcggcaacccaatctggatgttttcttgccgggtgatcctcagacaatttattaagatctgtatgattcattgtaatacggtaaggattaaaccacgcgtgaaattccaaatttcgtttatgggtttcttcaatcataaatgcaagaggatcatagccggggtccttcccttggacaccggttaagtattccgaccaaggcccgtaagctgacggataaaaggcatcagccgtcggtttaatctgaacgataacggcattcattcccattttttgcacatcgtccagcagtttgatatactcctgtttttgctctttcacagataacccttttttggacggccaatcaatatttaatacggaagcaatccatacggctctcagctctctgtcagactgcgcattggccataaacggaacggaaatgacaaacgttccgatgatcaagctgacaaggaaacggataatcgacttttggcaaaccttcattctgtttcttctcccccattacatcactttcactcgctattacggtattcccgggctataaaagggtgattaacagaatgtctatctcactaaataaacgaaaaaagtcctaaagcatgttgtgggccgcttttaggactttttatcattcatcatggtttgcaaactttttaacacgtcaataagttttacgccgacaccgacagccgtttcaaggatcgcttgtgctccggcaatggctaaaataaagatcagcggtattgcaatacgaggcaaaaaaagatagccaagtccgatcaagatggcacaccaaacaccggcacaccagtagcaattgagcatgtatccaaagttagaagccggcacacttttttcatctacatgcccgttttgatcaacaatccttttctttttcataaaaggtttccggataaattctgtgattttgtcgaatacaatcaaatgtgtcagcctgtaactggctagaatcagcatgataaacgtaagaaaagatagatgatccatgacaagcctccaagaaaaaggatgatgttatcattccctagtgtcatcgatccattctttgatacaaaaagaagcggacagagaatgcctctgtccgcgaatccgctctattgtttgtgcgggattgctttatttgaagtgatcttttctaaaatgtcgaggatgatgtcagcattcttttcagcatatgttccttccagcatgtctttatgagcgccaaaacccgtgtactcactatagtttccacaggcgccttcccatttcgttaagcctgtattctcgctggtttctgggtggattccagcttcgatgaaatgaatacttgctttgatgtgcccttcattcagcaattgtgcccaatattcctgatagtttctttttttcttcatcaccttttctctgactgcttcaggcagatatgctgcagattcgtcattaccggtatcgataggcaaaggctgttcttttagataagcgtccacgataatgaagtcgctgacttctaatcctttgcgctccatagcctgtgccacttcaaaagccaggtttccgcctgcagagtagcctaataaaacgtatgggcccttaggctgtatgtccgtcatgcaattaacatattgttcaatgcgggtgtcttgttcaataaagtgaaacccgtatacggctgccttctcattcagcaataaagcaaggtctttaaaataaatgccaaatcccgatatcggcgggaagcagaaaagattttgcgcgccgtgctggttcagtttgatcacatgctgttcatttgctgctgtcagctgtttagaataaagtttttcggcaagctgagcgattgtcggatgttcgaacaagaaatcaatcggtatgtcaatgttctgctgatgttttagtgtatgtatgacttgcagtgcttttagtgaatgtccgccaatagcaaagaagtcatcatcaatactgattgtgttaacaccgaggacttgcttccaaatgttcgccaattcttcttcaaccaagtttcttggcaatatgatgttctgtcgtttggcaggcttattttctggaataggcagcgcgctgcggtctatttttccgtttccggtaagcggcatccgctccacacgcacccagtgctgcgggatcatatagtctggaagcacacgcgccaaatcggcgcgaaaatccgtatctgtttttttgtgatcaccgacgtaatgagtgtacagctgcgcctctccatctttttctctcaatgtcactgctgcttcttgaacgccttccatttctaacaggcgcgcttctatttcggcaggctcaattcgttttccgcggattttcatttgcctgtcaattctgctgatgtattctaagtttccatcaggcagccagcgcgccaaatcaccggtacggtatattctttctccaggcaagaaaggatgaggagaaaacacagcatttgtcaggtcatctttgttcaaatagcctttagcgaccccatcaccgccaacacaaagctcgccgggaacgcctattggcaaaagacgtccttttgtatctaagatgtaagcggtgctattgctgattggttttccaatcggaatcggccccgcatagtctctctttatttcaaaaaaggttgaaaaagtcgtgttttccgtaggcccgtaaatattatgaagcgcgagatctggacaggcgtgtctgacagcattcatcagagcaggagagagtgcttctcctccgacatataacgtatggaggccgcgaaacatgtcagctcgtacctgtgccagctgattaaaaagagctgtcgttaaaaatagcactgtgatgtcattttcaagcaaatacgctccaaaccgatcaggtgtcagcattgtcgatttatcaatgatatgaaggcttgcgccatttaaaagtgccccgaacatttcaaaggtgacggcgtcaaagctgatagatccagtcagaataaaccggtcatcaccggacgcagacgtgtaattgctgtttctgacaagggacacgacattgcgattcgtgatcatgacccctttcggccggcctgttgatcctgaggtatacatgatatatgcaagatcgtctggactggagatggtgttgataggaaaatggttctctcccatcaatgcctgcgcatctgcaatcatacatgttcctgagaacgcagcattttgctccagccccttttgaacaatcagcatttttgcttgcgtttcctcaagcataaagctgactcgttcaggcggaagctcctcatcaagcgggaggtatgctccccctgcttttaatacggcaagcacactgatcatgaattcgggagaatgtgcagccaatattccggctgtctcgtttttccgaaatcccttttgaattaactctctggcgagcgcattagagcgtttatcaagctctttatacgaaatagacatattgccatacacaagtgcggtatggtctggcgtcttttctgcttgttcgcgaaataaatcgataattgtatgtttctttggatactccgtttttgtattgttgaactgtgtgacaatctgctctttttctgttgcatcaagaaaagaaaaatcagcaattggcatatgagggtgctgtgcagctgtgctaagcgcttgcgtaaattgcctcttgatacaactgatccaggcagcatcgtaaacgaatgcattatagctgaacttgatgacaagctcttcgccgggagcaacgacaagattaaagttatatcctgattgctcggatacttgaacttgatcgatttgcagcggtgaatcggtctgatcagcggaatcggcgattttctgctgtaacggatagttttcaaagacgataatgtgatcaatcagttcctgttttaatgcggtgtttgcctgaatatcaaataaaggctggcaggtaaacggctcagcttccagcatttctttctggcatcgtatgaacagttcttgaaacgtttcgtcttgatgtgttttaattcgaatcggtatggtattgataaacaaccctatcatttgctccacgcccgggatttctgacggtcttcctgatacaactgcgccaaacacaacgtcgtctgtgcggttatattgctgcagcatcacaccccagacagcctgaataagggtagcgagcgtgacgccgtgttgtttggcagtctctttcagcttgtctgtcagtggtttatttaatgaaaatatcaaatcttcacggtgataaccttcttttgtttctttatcagacacacgaggcagaggtgatggagtgctgtagttttttaaataggtatcccagtaggccgctgctttttctttgtctcggtttgtcagccaggaaatataggtgctgtacggccggacagggtctaatgaaagcggttttcctgcatgaatcgattgataaatttgcataaattcctgcataacaatacctaggcaccatccgtccattaaaatgtgatggtgactccaaagacagacatgctcatcttcagctgttttgaacagagaaatccgcatcagcatgtctttttgcagatcaaagcctttttgcttgtccttctctttaaagcgttcaatatactcattctggtcgtttgttggcagatgggaaatgtcttcgctgtacaaatggaattcacgttctgtcatcacgacttgccgaggtcccgacaaatgcgggacgtgcggcaaaaacacggttctgaaaatatcatggcggtcgataatggcttgaatgctgcgctgaaaccatttatagctgaggcttcctttaatggtgaagagcgactgctcgacatacgccccctcctctttacggaggaaggaatgaaagagcattccctcctgcatgtgactcagaggataaatgttcttgattttttttatgttatccatagtgtctgcacctttcttcacggtttcattagtgaaaactgagcatatcagcaatctcttgcagggcatcctcggtcagttcttgatcatcataatcgctgatcgttttttctgtttcgcttttgttctggcagtgttcgatcagctgtaataaaaattgacggcatgtttcgctaagctgttcgatggttttgcgctgaaaacgggtagtgtcataagtcatattgacagtcattttcccttctgcagcgattgcactgatatccagcgactgttcacggttccatgttgtgctgatatcacccccggcacccagcggagagaatgagaaggcgtcctcctcaggtacttcagctgtgcggccgctttcaaattgaccaagataattaaagctgatttctggtgcacctgtgaaattgatgtcttttttgccaggcggagtcaaatatttgatgacaccgtagccgaatcctttgtcaggtacacgtctcagtgtatcttttgttgtttttagcacatgaaccatgtattcttccgaatctggcaagtctgcgttcaatttaaccaataacggataaatggcggtaaaccatccaaccgtccggctcacatctattccttctaatacatcctctcgcccgtggccctctaatgatagtttgaaggcggattgattggtccaatggcgcagcgcaagaatgacagaagcgagcagcatgtcctgcgtatcagtgttatatgcgctgttggcgtcttttaagagtgctgctgtctctttctcgtttaaggtaaacgaaatcgtggaccgttgtccctcgtgtgctctagttccatcaatgtgatcaaaaggcaatgcctctgtttgatactcttcggcttcgcgccaatacttgagctgtttcatgagctgctggctttcagcgtagtcagagagctttttcgtatacgctttaaatgagcttgttttaggcggcagtttgataaccttcccgtctgcagcttggcgataccctaaagccaaatcttcaagcagaacccgccatgaaatgccgtcaacgacgaggtgatgagcagataaaaataagaaatcaccgtcaattgtgtggaaaagaccggcttgcagcagcggaccattcttcaaatccattttctgctgaatatcaagtacatgacgtttgataataggctcatacgctctatttccatcagtgcataaatcaatcatctcaaggccgtacaacgcgtcgtccgaatgactgagcggccgattatattgatcccactttccttgttcattctgtgtaaacaccattcgcagcgcatcatgatgacacgttattgcttttaacgttttgcgcagtgcgtcttcttgtacaaaggtacttcgatgcagcattacggactgattaaaatggtgtttttcttttatatcttgagaaagaaaccatttttgaacaggcgaccattgtacgtctccctcaaccgcagcttggctggaacttgtatctgaatcacggatataagctgccaattcttgaatggtcggatggctaaacaaatctttcactgccatttgcttgcctatccggtgaagccgcgcagatacctgtaacgctttgattgaatctccgccaagttcaaagaacgaatcagctgttccgatcttttctgcccccagtacttcttgccatatatctgccagtatttgttccattttgctggctggcgggaggaatggacgttcaccttcgtggttatatacaggttttggaagtgctccgcgatccagcttgccgtttggtgacaatggaagtgagtccagtttttcaataaacgcagggtgcataaacaccggcagcttgttttgtaattctgagcgtacagcatttgtgctcaactctggttttgtcaccacataagcacttaattcggtttgtcctgacgctgtttcatgagcaactactgcggcgtcttttacaccatttatacaccggatgaccgattcaatttctttcgtttctacacggtatcctctgattttgacttgatcatcgattcttccgagatattcgagtgttccgtcggccatccatctggcggcgtctcctgttcggtacattcgtgtttcgggtttaaatggattctgcgtgaatgctctctctgtcagttctggaagattaacgtaccctcttgcaagccctgttcctgctatacaaagctctcccgcaacaccgattggctgaagctgatgattgctatttaaaatcagcacttgagtcccgtcaatcggctggccgatgcttacgtatgcctgcttttccatatgtctcatgacggtagtcgccacgctgttttctgtcggtccatattcgttggcgagttcggtatgcggacatatagctaagctgcggtcgatcaattcgcggtcagccgcttctcccgccagtgtgacgactctaagtgtctttacatcttccggctgcactatgtccaaaagcgctcgatataaaacaggcacaataatcatatgtgtaatccgttgacgagacagctgatgcttaatgaccagaatatccttcgcttcctcttcatgaagcaaaacggcttttgcacctgacaaaagcggtgtaaacatactcgttataaagccgtcaaatgagaaagaaaagagctgcagaatggtatctgtctcgttgaatgcataagcgtttcgccgccactgaagagtgttggcaatacctttatgctcgaccattaccccttttggacggcccgtcgttccagaggtataaatgatataagccaaatgatgagcagacgatacttgcggcagcggtgatttgtcgtatgcctctacactttctatcgctaagaactctccttcaaagtcagcaagtgcttcccgatccgcttcatttattgtcatcagcagtttcgttccgctgtcgctaaggatatagcgtttccgttctgtcgggtattcaggatcgatgggaacgtaacagcctccggctttccacacaccaagtatggatgctatcatactgaacgaacgatgcatcatgatgcctactggtgtgtccggcttaacacctcggctgcgcaatgcacgtgcgattccattggaccactcgtcaagctcctgataagtgagtgttttgtctccgctgacaagtgcagaagcttttggtgttcgtgcagcttgctgctcaaacaattgactgattgtttgaactccgtattgattcgcttgcccggtgttaaactcattaagcagctggtgccgctcttcttgggtcaggatgtcgatatggttgagtgtcacctccgggtttttgccgatgatgctaagtacatttgttaaatgcgatacccagcgttcaatggtggttttctcgaacaatgcggttgaatattcaaaaaggaaatgaatgtttccgtcgccctcagatgcctgtagtgtcaaatcgaatttagaaacgagatgagaaacttgtgccggcttcattttcaaatcatgaagatacaatggctcgtaatcattattttgaacaactaacatcgcatcaaacactgggttccggctcatatctcgtgtcaatccaagcttatcgacaagctcttcgaacgggtaatcttggtgctcaaaggcttccaatgctgtctcacgcacttcctgcaaatactgtacgaatggcttcccgccctccgggcgtgtccgaagcgccagcgtgttcacaaacatgccgagtatcggctcaagatccttgtgcggccggccggcgattggcgagccgacgatgatatcctcctgtccgcttaagcgtgacaagaacgcggtgtaagccgcaaggagcaccatgtacagtgtgcttccgttttctcgtgccagcttgtgaaggcctgatgcaacctcttgatccagcgtaaatgagaccttgtcaccagcgaagcttcgcaccggcgggcgggcatgatcagcggggagatccagcacaggcagctcgccctcgagctgcttcagccagtacgcctcttgcgttttgtacgcgtctcctgttttgaatccttcttgccatacggcataatctttatattgaatgcgcagcgccggaagcttccgattattgtacagctcgccgaattcttgaatcagaatgttgacggaaacaccgtctgaaatgatgtgatgcatatcaaccagcaacaggtgccgctcatctgatacctttacgatttgggcacggaacagcggcgcttggctgagatcaaacggtttgataaatgcggctgcggcctcctgttcggttcgttcgccgagaactgtagtctgtaacgtaaacggcacctcgtcatggatgcgctgcaccggatcgcctccttcgtcctgttcgaaggcggttcgaagcgactcgtggcgcttgatcagctcttggaaagctctgtccatcctttcagggttgagcttcccttcgagctctaacacagccggcatattgtagcctgtccctccgtcttccagctgctgaaggacataaatccgcttttgggcagaggaaaccggataggtttcctgtttttcagcgggcttaatcgcttcatatggactgtccgttccttcacggataacggtagccagtccttctaccgtcggatgggcaaacacatcttttagcggcacctgtacatcgaattctttggtgatccgtgagacaagcgccgttgcttttaaggaatgtcccccgcggtcaaaaaagttgtcgtgaatcccgacagggccatttttcagcacgtcctcccacagctgagaaagcttcatctcagtcacgtttctcggcgctgtgtaggtctccgcatctgccgctccgccaggagctggcagggcgtttcggtcgagctttccgcttggcgtaaccggccactgtttcatttctatcatataggctgggaccatgtagcccggcaacagtctctcaagctgtgcacgcacttcgtttctttggagcccttctatataagcgcataattccggctccccgctgtctgtccgtacggtaacagccgcctctcttacaccttctatatttcttagtgccgcttcaatttctcccggctcaatccggtagccgcggatttttacctgatcatccgtgcgcccgaggaattcaacattcccgtcagggagccagcgcgccacatccccggttttgtacatgcgttcccccgggtaaaacgggtcttcaagaaaacgctcctccgttaatgccggccgattcaaataacctctggcaacacccgctccggcaatgtatagttcaccgatacatccaacaggcagcatccgctgattctgattcaggatatacaatctgacatgatgaacaggttttccaattggaatccgttcaagtttttcttgcggcggacaatcaaagaatgcagcttctacggttgcttccgttggcccataggaattggttattgaaacatttggaagcaacacgtgaaatcgggagacaagatgggtctccagctgttctcccccagaaaacactcgcttgagtctgtttgtcttaatcggtacagagcgatattttatatgttctaaaaatgcatggagcattgaaggcacaaaatgcatagctgtgatcttttgttcttctatggccttcgcgatcacttcaggttctttttcgcctccctgaggaagcagataaacagaagctccggcataaggccagcaaaacagctcccatattgaagcatcgaatgaatatgatgttttgtgcataatcatatctgaatgctttagctgatagcgggactgtagggaattcaaaaaattcaccgctgatcgatgttcaatttcaacacccttaggcatcccggtagaaccggatgtatagatgacataggctaaagattgcgggagaacatccacattcggattggacaaacgatgtgccagtccgctatttgtctgattgagatagacaatctctcctgcaaatgccggaacatgaagaccggaagactgaagcaggagaatgtttgtaccgctgtccttcagcagaaagctgattcgttcttccggataatccgggtcaatgggcagataagcgccgccagctttaagaatgccataaatgccgatcagcatttcaggcgaacgccggcctataatggcaacagtcgtttcagattttactcctcgtccgatcagctcccaggcgatacggttagcctgttcgttcaattctttataggtcatcactccatcttcgaagataacggccgcctgatcaggcgtttttgctgcctgctgttcgagtgcatagtgtagcgtttgattcattgaatagcccgtctcctcaaacagatggcatgattcaatgaaatctctctcttcttcttttgttaagattggaatatcgtccaattctgtttcaggactggcagctgtatgttccacaagcgtggtgaaaaggctggcccacctttggatggtttctttctcaaacaaagctgtactgtattcaaactgacagaaaagctcggaatcatgctctgtaacgtatagggaaatatcaaattttgatattgggtgctccaagtcgttccactgaagctgtatatcattcatttttagcttttgctgttccatattctgaaggactagcgttgtgtcaaacaaaggattccggctcatttcccgctgcacaccgagtttgtccacaagctcttcaaacgggtaatcctgatgctcatacgcttctaatgccgtctgtctgacttctttcagaaattcctcaaatgtcttattacccgctgggcgtgtgcggagagccagtgtattgacgaacatcccaagaacagcttcaaggtcggcatggggccgtccggcgattggtgaaccaatcacgatatcatcctgaccgcttaaccgagacaaaaaggctgaatacaaagcgagaagcgtcatataaagcgtgcttctgtttttatgggcgagccgctttatgcgggccgtgatctctttgtccaattgaaaggttacttttccgcctatgaattgccgttctgccggacgtcgtttatctgttggaagctccagtataggaagatctccgctaaactgctgctgccagtaagtctcctgcttttggtacgagtctccctttttaaatttctgctgccatacggcgtaatctttatattggatccgcaatggcttaagctgccggtttgcataaagatcggtaaattctcggattaggagctgaacggatacgccatctgaaatgatatggtgcatatccaccagcaatacatgcttctcgtttgacacttctataaggcctgctctaaataatggcgcctggctgagatcaaagggacggacaaatccctcgatagtggtctctttacttaacgtaaacggcacttcggtgtggatacgctgaaccggctcgtcatcagctccaggtacaaaggaagttcgaagcggctcatgccgactgatcagttctttacatacagcagacagtttggcgacatccagtgcaccttccagttctaagaccgcaggcatgttataggcgacaccctcatcaagctgttgaagcacatagattcgtttttgggccgaagatacaggatatgtatcccttttttctgctggttcaattgctgcatacagattttgttctgcctctcgaataattaaagctaatccttcaacagtcggatgagcaaagatgtccttaagtgaaacttgcacatggaattcctttgcgatccgtgacataagcactgttgcttttaacgagtgaccgccattgtcaaaaaagttgtcttggatgcctatatgcccattctttagcacatcttcaaatagttgcgaaagctttgcctctaacagatttcgaggggcagtatatgggtttccgctgattgaagcatctggctccggaagtgctgcgcgatctacttttccgtttggggtaagaggtatgctgtcaacccatatccatttcgccggaatcatgtattctgggagctcactagccatataactgcgtaaatctattgcattcagcttttgtacactgcaatagtaagcgcataattcatgttcaccgttttgatcttgccagatgagaatggcagcctcactaatgtccggatgattcattagcgtgacttcgatttcttgcggctcaattcgataacctctgattttcacttgattgtctgcccgtccgatatattcgatgttgccgtcttcaagccgtctggccaaatcacctgtccggtacatgatcacatcaggcttgaatggatcggatgaaaatttgtcgcttgtcagtttatcgtgattgacatatcctctggcaacacttgcgccggaaatatagagttcgcctggtacgccgcatggctgaagctgtttttgatgattcaaaatatatagatcagtacagcctatcggtttaccgattggcggaagctcaggaatagggtctccaggatgaatggtatacgtagataccacatgagtttctgaaggtccgtaatgattgtgcaggtgtatgccgcgttcacacaacacatcttggaaaaggtctgaaatcattaattgttccccggctgcgatcaggtgtttgacgccatcaggaaacgagttcgcaagttctcgctcgctgaaaatcattttgataaaagcagttgggagaaacacaatattcgtctgatgcttgtttataaatgcaaacagctgaggcacatctctttttatggcttctggcacgatgtggagtgtgccgcctttcagaagcgcagaaaatatttcttgatagcagacgtcgaaggaaggtgtcgcaaattgcagaacatctgcttcaaagtcaatgccggagtgagtatattcgaacttcagcaagttagccatgtttcgatgctcaaattgaacaccctttggtttacctgttgtgcctgatgtataaatcatatacagcagatcgtcagcattgttgactgactttatgttactgccgtctactttgctttcgatatcttctggatgagtgataatgtaattgtcttctaacgatgaggaaagatgcgcttgtgaaacaacatgcgaacagccgcaatcatgcagaatataacggattctgtcagccgggtaatgcggatcaaccggaacaatggcgccgcctgctttcaagataccaagaacacctgtgataaacgccgctgagcgttccatcataatcgcaacgggttcctgtctcacaacgcctttcattcgtaaatgccgtgccaatctgttagccgctttattcagttctctgtatgttaatgagcaggcttgatcaattacagcatgagcatctggtgtcttttccgcttgcttttcaaacatggcatggatggtttcgtaaactggtgttcgatctgtgatttctccaatcagctgccgcttttcagtatctgtcgtgatatcgatttcttcaggtggaagattcggattatttaagatttgtgatacagcattcagaagatgctctttgacagagagcacaaaagaccgatcgtgctgctccgcatcatagttcattttgatatgaatttcttcccctggcgccaccataagataaaagctgtagttggtttcatctgcgacagtgaaattatgaatctgaaaaagatcagaagcatgttcctgtttgttcagcatttgaatctcttgctgcaccggatagttttcaaatacgagaatatgatcaatcagcccttgtttaacagctgagcgggattgaatctcatataaagggtggtagctgtacgcttcagcggcaagacggtctttttgcatatcttttataagttgaagaaatggcgtttttgccccctgcacccgaaccggcatcgtattaatgaaaagacctaccatatgttcaatgccttcgatttctgcgggtcttcctgaaatgacagaaccgaatacggcgtcatcgttattattatatttttgtagcagaatgccccaaatggtatgaaaaatcgtactgagtgtcacttcttctcttgcagcaagctctgaaagtctgctgctttcttccttagagaatgaaaatgtaacgtgttcctgcctgctttttccctttgtttttttctgcttcgggagcacggtttgctgttcgtggccggaaagataatggtcccaataagaaaccgcctgctctttgtcttgctccatcagccatttgatatactttccgtatggctggaccggctccaatgttataggggatgcatttacataagatgcgtaaatatgcagaaactcctttagcacaatgctgaggcaccaaccgtccatcatgatatgatgaaaggtccaaatgcaagagtactggctctctcctgtttgaataagagcgatgcgcatgagcacatccttttgcaaatgaaacccccggtcccggtccttttctttccattgctcgataaactgtgattgctccgcctcgtttaaatgagtaatgtcttcttccagcacgatgacatttcgttctctcagaacaacctgctggggggaggaaacattttggctgataaaaatcgttctgaaaatatcatgtctttctacaagagcgttgatgctgttttgaaaaaactgcgggttgacttttccttctattgtaaaagaagcttgctcaacatacgcctgtgaatctttttgcaggagggaatggaaaagcatcccttcctgcatgtaagacagcggataaatatcctgaattgaattcgcttttgtcatgttcatgtctccctgtcacgattttctacaattcttccaccaagctggatatgctgtccaagtcctctgccgttaatgattgactgctgaaatcgctcagtgtcttttctgctttctgttgaccggcgcagtgtttcataatgtccagcaaaaagtgttcaatcctgttaataagctgctccattgtgtttctgtgaaagcgggctggcggataactaagattgaaatggagctttttgtctgctgccattgcactcatctcgatgatttgctcacgcttccatgtatgagtgatatcctttccgctaccaaggcttgatgggcggaaggtgtcctgtctttcgatgtcgttgaactggcccaaatagttaaagctgatttcaggtgtttttgaaaacgtaatgcttttattttcagggtgtgtaaggtatttcagcataccgtaacctacccctttgtttggtatccggcccagtgtatctttaacggtttttactgaggttccgagctcatccctatgattttcaaagcttatgagggccgggtacatggatgtaaaccagcctaccgtcctgctgatatctaactctggcagaatgtgttctctcccgtgtccttccatagcgatacggagcttgcttcctcctgtccattcacaaatcgccaaggatgctgcggttaacagaatatcttgtgtatctgtgccataggcgtgattgacgttttgcagcaagacggcggtgtctgcttcagtcagtgaaaagcttaatgagtcccttttgctggtgtccatgttcagatgctgcggtatttcgtatggcagttctgcggcttgctgttcttctatacttcgccaatacgcctcttcgcgaatcagcttactgctttgggcatattcctgtatgcgtcttgcgtattcctggtaggaatccgttttaggcggaagctggatcgtctggcctgcagcagcttgttgatatccggctgacaaatcctcaagcaaaatccgccatgagacaccatcaacgacaaggtgatggatcgcaaggaacaagtaatctccgatcagtgttttaaacaaagcggcgtgcaacaatggtccttcctgcaaattgatgctttgctgaagatctgcaacttcttgtttgatttgcgtctcccagccgctttctgactgtgaaagatcagaggttcttaagctgtatagctgtgactcatgaatgccttggttgatttgaatccatcgcctatcatcgttgcgataaaccatccgaagcgcatcatgatgctccgccagttttttcaaggctggtctaagggcgttttcagacaaacgtccagaatggaatagcatgacagactgattgaaatggtgtctttcttcaatatcttgtgaaaaaaaccattgctgaacaggcgtccaaggaacgtctccctgaatgggtccttgctctatgattctctctgacttacggataaatggtgataagtcctttatctttggatgacggaataaatcacttacctgcaagcttagcccatagcgcccaaggcgtgcagaaacttgaagcgctttgattgaatctccgcccaattcaaaaaacgaatcctctattccgatcctctggatgccgagaacctcctgccagatcaacacaagttggtcttcaaggtcatttcgaggcggagcgtacgtttgtttagatgtgaaatttggttcaggaagtgcttttcggttcaatttgccgtttgatgtgagcggaagagtctccatttcaataatgtacgccgggatcatatagtttggcagcgaacgcgcgagaagtgaacgcacttgttcagcattcgtgcctgcttttacgctgatatagccaaacagctctttgctcccggtctgggctgtacgtgctaacactgcggcttctttgaccccgtctatttgacgaagtgctgattcgatctcacccagctccacacgatagcctctgacttttacttgatcatcaatacggccaacgtactcaattgtgccgtcaggaagccagcgcgccagatcacctgtgcgatacagtcgatcgccaggtgcaaatggatgtgggacaaatttctctttcgttaaatcaggacggcccaaatatcctctggcgacgccatctccgccgacacaaagttcaccgacagctccgaccggctgcagcactccccattgatttaagatataagcggtggaattaccaaccggccgcccgatcggaatggaaagttcatatgttttttgaatgtgaaggcatgtcgaaaaagttgtattttcggtagggccatatccattccatatagatacttcagggcagacatttctgattcgattgacgtggctcggcgacaaagcttctccgccaataatcaaatgtttcagctgtgaaaatgtttgttcattttgttctgtcaaatgattgaatagagaagatgtcagccaaatcgttgtgattccttgatgttctatgtacctcttaagctgatgggaatcgagaaatgtttgttgatcggacagatgcaaagcggcaccatttagcagcggtccgaaaatttcaaatgacccaacgtcgaaacctattgatgatgtcatcagaaggcggtcttcaggtgtaaatgtaatataattgctgtttttaacaagacgaattacacttcgctgctcaatcatgacaccctttggtttaccggttgatccagaggtataaatgatatatgcgagtgaatgtggccctgctgaagaatcaacgttcttcgtttttccttgcttttgaatatcttcgattatgatttgttcacattcaatgtctaatagctgtttttctgttttttcagattgaaggagtaatgccgccccgctgtctgacagcatataagctattcgttcaacaggcagatcagaagcaataggcagataggctcccccggctttcagaatgcctagcattcctgcaatgagttctggtgttctgcctgtcaacaaggctacaacactatcaggccctacgcccttaatctgtagaactgaggcaatttgatttgcccagctgttcaggtcctcgtaagtaaatacttgggtgtcgctgacaattgctacagcattaggcgtttgttcagcctgcatttcaaagagtctgctgatggtttcatttcttggataatctatttttgtgcgattgagctcgtggataaggtaatgggtctcatcctcattcaggatatttattgttccgagagcggctttgttgtctttgaagatggagagtaacatattgatgaagtattgaagccacttttctatcgtttttttcttatataagtcagtactaaactccatttggaacgtcagcaaaccgtggggctgttcctgggcatatagggttaaatcaaatttggacgtttgatgcccattgtttgctgcaggtttgagacaaagttcatccagctccaacgattcctgatccatgttttgaagaacaaacattacgtcaaacagcggatttctgctcatatcccgtgtcaattcaagcttatcaacaagctcttcgaacgggtaatcttggtgctcaaaggcttccaatgctgtctcacgcacttcctgcaaatactgtacgaatggcttcccgccctccgggcgtgtccgaagcgccagcgtgttcacaaacattccgagtatcggctcaagatccttgtgcggccggccggcaattggcgagccgacgatgatatcttcctgtccgcttaagcgtgacaagaacgcggtgtaagccgcaaggagcaccatgtacagtgtgcttccgttttctcgtgccagcttgtgaaggcctgatgcaacctcttgatccagcgtaaatgagaccttgtcacccgcgaagcttcgcaccggcgggcgggcatgatcagccggaagatccagcacaggcagctcgccctcgagctgcttcagccagtacgcctcttgcgttttgtacgcgtctcctgttttgaatccttcttgccatacggcataatctttatattgaatgcgcagtgccggaagattccgattattgtacagctcgccgaattcccgaatcagaatgttgacggaaacaccgtctgaaatgatgtgatgcatatcaaccagcaacaggtgccgctcatctgatatctttacgatttgggcacggaacagcggcgcttggctgagatcaaacggtttgataaatgcggctgcggcctcctgttcggttcgttcgccgagaactgtagtctgtaacgtaaacggcacctcgtcatggatgcgctgcaccggatcgcctcctgcgtcctgttcgaaggaggtacgaagcgactcgtggcgcttgatcagctctttgaaagctctgtccatcctttcaggggtgagcttcccttcgagctctaacacagccggcatattgtagcctgtccctctgtcctccagctgctgaaggacataaatccgcttttgggcagaggaaaccggataggtttcctgtttttcagcgggcttaatcgcttcatatggactgtccgttccttcacggataacggtagccagtccttctactgtcggatgggcaaacacatcttttagcggcacctgtacatcgaattctttggcgatccgtgagacaagcgccgttgcttttaaggaatggcccccgcggtcaaaaaagttgtcgtgaatcccgacagggccatttttcagcacgtcctcccacagctgagaaagcttcatctcagtcacgtttctcggcgctgtgtaggtctccgcatctgccgctccgtcaggagctggcagggcgtttcggtcgagctttccgcttggcgtaacaggccactgttccatttctatcatataggctgggaccatgtagcccggcaacaggctctcaagctgcgctcggacttcgtttctttggagcccttctacataagcgcataattccggctcgccgctgtctgtccgtacggtaacggccgcctcccttacgccttctatgcttcttagtgccgcttcaatctctcccggctcaatccggtagccgcggattttcacctgatcatccgtgcgcccgaggaattcaacattcccgtcagggagccagcgcgccacgtctcctgttttgtacatgcgttcccccgggtaaaacgggtcctcaagaaaacgctcctccgttaatgccggccgattcaaataacctctggcaacacccgctccggcaatgtatagttcgccggcgacaccggaaggctgtacggctaaatgcggatctaaaacatacaaacgcgcaccaggtacgggcttcccaatcggaatccgcaaacggtctctgtcccgttctggatccaatacgtaaaatgccgcgtctaccgttgcttctgtcggcccgtagccatggattaatgatacctgcggcaatacagaagcaaaacgggctgccgtacgcggcgcaagcggttcacctccggcgaatacacgctttaggtttgtcccgtcaccaagcgctaacatttctgcttgatccagaaagctattcagcatagccggaataaaatgagccgttgtcactttttcctgatgaatggcttttacgatcaatgcggagtctttttcccagccgggcggaagcagatacgccgaagcaccggaaagagcccaccaaaacagctgccacacagacgcatcaaaggaaaaagaggttttcaccatgacaatgtcatcttctgaaagcggaaactggtgctgcatgccggtcagaaaggaaacagcctggcggtgctcaacggccactcctttcggctgcccggtagaccccgatgtatagatgacataggcgagagaaccgccgtcagcaggagtaaacagatggttttctgctttttcgctcgcaagagatgtcatatccacttcaagcgtttcgccagaaaagttcggtgcggagcatcccggctgtgtcagcaagagcgatgccccgctgtctttcagcatgtagctcagccgctcctccggatacgcaggatcaagcggcaaatacgccccgccggccttcagtacagcaaggacagcgatcagcatgtcaggtgagcgttcagacaggatcccgacgatactttcgtttgtgacgccgcgtgccgcaaggtgagcagccagccggctggcgtacatatcaagctcagcgtatgtcagcgaaccgcctgaaaagcgaatcgctggccgctccggtgtgactgccgcctgtcgttcaaacagcccatgcaaggttggggcttcaggtgaaacagatactgtcctgttattttgagaaacgattttccgtgttttgtcctcatctagcaatgtcatctttgacacaggaagagatggatcagagatgacgtcagagatcatgtgctgtaaataatcttttatttcggacatcatatttggttgataagtgcctgtatgaaaatgaatccgaacgtacaaagtacgccctgggatcactttgacactgcatctataattagttacctcttccatctcaaaatctttcacggagaaatcaaatgatccagcttgattcagctcttcaatctcttgttgagtaggtgtattttcaaagacgataatatgatcaatcagctcttgtttaagagcgctctgcgcctgaatgtcatataaagggaagtaactatacgcttctgcttcagtcatgtccttttgcattccgctgactaggtcagaaaaagacagaaaatcactttggactcgaataggaatggtattgataaaaagtccgaccatgttttccacatcttttagctcagaaggtctgcctgatataactgatccgaatacagcatcgtcgcgacgattgaacttttggagcatgattccccataaagcttggaaaacagtgttaagtgtcgcaccacatgctgcagcgattttctgtaattcggaggtttctttttcaggaatggtaaacgtgatctgctgtaatgtcccatccgacatttgatctgttcttttaggcagaggtgaagctttttcgaaatgctgaagcctctttttccaatactcagctgcttcttcccggtcttgctgcatcagccatttaatatacgtcccgtacggctgtacgggaggcaaatcaggaaactgcccttttccaagcgcttgataaatatggagaaagtctttaatgacgatgcctaaacaccagccatccattaaaatatgatggtggctccagatacagacataatgatcaggcgcccattttaaaatagatattctcatcagtacatccgtttggagatcaaagccttttgatttatcctgttctttgaatgcctctgtacaatgttctttatctttttcattgagatgagaaatatcttcaacatgaatatggcaatgacgttgcttgagcacgacttgacgaggtttggctacatttttatagatgaatgctgttcgaaagatatcgtacctgtcaaaaacagcatccatacttttctggaaacgctccaagtcgagctgtccattgatcgtaaaagaagcctgttcaaaataagctctcgactgttcatcatacaatgagtgaaaaagcatcccttcctgcataaatgacaaagggtatatatcctgtatttcaggttgctgcggcatcagtgaatctcctctcctatagtttgttgacggctcccatgatctcactcaattcatcaagcgttaagtcttcatcagtgaaatcagatgcgctccactctcggttttctttgccggtacaatgctcaatgatgttttccagagtctgtttaaaatgcctggaaaatgtttggattgttttttcctcaaattgaaccctgttatagatgatgtgcatgttcaggcaccccgaagaaacggcgccgctgatatccagtgcataaggacgctcccagttcgggctgatctcatttcctggcttgatgtcagacacctcaaaggcatttgattgaatatcctgatcaaactggcctaaataattaaagctgatttctgggctgtttttctgagagccccatcttttgctgatatatttcagcacgccgtagcccgcgcctttatgcggtatacggtgcagcatatcttttgtctgtttaataaggtggcccagccgctcttctttgtccttatgatcggaatctctcatatcaagccacacaggataaatggaggtgaaccagccaacagttctgctaatatcgatgtcctcaagatatgattcccttccatggccctccatgctgattttaaattggttatttcccgtccatttctgcaaagcaaaacctaaagctgtcagaaggatatcattcatctccgtgctgtaagctttatgtgcagccgttaatagtaattctgtgtgatggcgagatagctcaaaatcaatcacttctgtatctatgaatgtgttagatgctgcgtcattgtcttttggaataggctggatgtgacggttctcgcactcatcccagtacgctgcttctcgctgcacctggcggcttttagagtagtcagctattctttgtgaatacgttaaatatgaatctgtttttttcggcaatttaatagattctcctgagactgcctgtttgtaagcagctgaaaaatcctcgaacaaaatgcgccaggaaaccgcatcaacaactaagtgatgaatcgtcagaaataaatggtcaccattctcggttctaaacaatccagcatgaagcaaggggccggtttccaaacgaatatgttcttgcatccggctggctgcttcctcaatcgtgtaccgtgcttctgttaggctatcctttacatcaaacagttcaagtgcatatagctcctcatctgaaagatctatccctctgtttatctgcacctgcctgccatcttcatgccggcatacgattctcagtgcatcatgatgagtcacaaggctttttagtacttttctaagcgcagcctcatcaaatcgttcagcccggtagatcataacggactggttaaaatgatggctttccagagattgcgagaaaaaccactgctggataggtgtccaagtaatctcgccttcgaccgggccttggtcaatggcgcgtacgtcttttcgaacccgggcggacagttcaccaagagtctgatgttcaaacatctcacgtactgtcgtttcaaatccgcgctgcttcagtctggcacaaacctgcagcgctttaatagagtctccgccaagctcaaagaaattggcgcttacacccagctcatctacattaagaagctcctcccaaatttcagccatgaccgtttcaatctcatttctaggactgatatcatcagatgtataagcgtgtttttcaggctcaggcagggctttctgatcgagctttccattaacagtcaccgggatgctgtcaatttgtatcatacgggcaggcagcataaagtcaggcaaggcgttttttaggtaagcccggatgtctgatatattcgcagcctgttgatcttttatcaccatgtaagcatatatagctgtttgcccttgctcgtctgctctggtaatgacagccgcctctttaatcattggatactgaagaagtgccgcttggatttcgcctaactcaatacggtgccctctgactttcacctgctcatcaatgcggcctaagtattccagctcgccatttgacaggcgcttagcaagatctcctgttcggtataatctgtctcccggaagataaggattggatacaaaacggtcagcggtcagctcatctctgttgagatatccccgtgccacaccttcgccgcctatatacagctcccctggaactccgatcggctgaagattcatatgagcatccatcacataagcctgcagagttgaaagcggccgtccgatattgcttttattttttacaatgtctgctgcggacaattttttgaatgttacatggaccgttgtttctgtaataccgtacatattaatcaaatcagtatgaggatattttttattccagctttgaagcatgccgggctgtaaggcttcgccgccaaaaatcacgtagcggatgtttaaatgatctgtatgattttgatcttcaagcatcaagctgtaaaaagcagtcggggtctgattgagtacagtgacgcgctctttttttaacaataaacggaatgcatgggggtcacgggctgtttctttagagaccacgactaatgtacctccgttcaataacgcaccgaacatctcccatacagagaaatcaaagcaataagaatgaaataacgtccagatgtcttcatggttaaattcaaaaggcaggttttgatgcttcaagagactgatcacattgcggtgctcgacaatgactccctttggctggccagtcgttccagatgtgtatatcacgtatgcgggctgatctgttactatttcttgaatgtttgcatcagccggaattgagttgttttcacattcatcgatatacaaaatatgcccggtgtagtctgcaggtttgttttgaccgcgctctgtcagcagcagttttgctccgctgtcattaagcataaagctaatacgctccttgggatattcaggatcaatcggcaaataggccccgccagcttttaaaatcgataaaacgccaatgatcatatcaggtgaccgatcgagcatcagaccgacgatatcgccagttcttaccccttgtttgatcagcatagcagctgcccgctcggctttttcattcaggtctcgatacgtaagctgagaatggccgcacaccactgcgatatgctccggatatttagcggcttgcttttcaaataagcttactatgttttcatttctcggataagccgcatactgtcccattttttcaaggagcaacctacgctctgcagcaggaagcaattgcatgtccgaaattctcatctcggtatccgccgttacccctttcaccaattcaataaaataggatgcccactgcgtaatggtttcttcttcaaaaagagcagtgctgtattcaaaacggcagcgtatcccactaggatgctcctcagcgtgtaatgttaaatcgaatttagatatatcatgtttaggagtgacagacgaaatcgacagaccaggcacttcgaaccggaaatcttcactgctttgaagcacaagcatcgcatcgaacagcgggttgcgatttacctctcgatttgtatcgagcttatctgccagctcctcaaaaggataatcctgatgctcgtaagcggtcagagccaggtggcgaatgtcctgcaaataggagctgaacgttttgtggccctcgggcttgctgcgcatcgccaatgtattgacgaacatcccaatgacgcgctccagatcagcgtgcggtcttccggcagcaggcgaaccgacaacaatatcctcttgtccgcttagcttagataacaaaatagaatagacagccagaagaatcatatataatgttgttcccgtttcagccattaaacggtgcagctcatcagccatgtctttatcaatgttgacttcaattgttccaccgctgaaatcagggagacgcggccttgttttatcaagcggtaattctagtgtaggaagactcccgccaagctgaccgagccagtaggcctcctgttttttgtatagctcttttgggtgcttctcttgctgccaaacagcaaaatccttataatgcaggtttaaagctggcaactcttttccgcgatataagtcagtaaattcttggacaagagtgctcatcgagacaccgtcggcaataatatggtgcatatcgagcagcaaaaagccgcggtgattgccgattgtaatgacacatgctctaaaaagcggaccggatgatagatcaaacggtttgataaaggtctcgattgcagactcaagcatttgttctgattccatttcaagctcttttagatcaaaagctatctctggataaatgatctgcacaggctcgtctctgtcaagcacaaaaacagtccgtaatgcttcatgccgattcacaagttctgtgagaacgcttctcaaccgctggcggttcagatttccgcgtaattcaagtacagctggcatgttataacctgtgctggcatctgccagctgatgaagagcatataatcgtttttgcgagaaagacagcggatagacatctctttgatccgcaggttcaatctgtgtaaaagcgtgttcttttaagctcatcaatttgaccgccatgctttcaaccgtcggatatgaaaacacctcactgagcggcagctcgacattaagctttttatgtattcttgataccagtgcggccgcttttaaggactgtccgcctaactgaaagaaatcatcacgaatgccgatgtgctgtttattcagcacatcttcccaaatatgtgcgagatcagcttcgattaaggttcggggcgccatatatgtgacactcgtattgttttctggttcaggaagcgcaaacctgtcaagcttgccgctggatgttaatggcatccggctgatgttgataatacttgctgggatcatataggacggcaatgtcccggcaagatgctgatacaaatctgggaggctgtttcccttttccggaacgatataagcaacgagctccttttcctcagcagaaacatcacgggccagtaccgctgcttcttttacccccggtgcttgtcgaagaactgtttcaatctctctcagttcaatacgataacccctaattttcacttgatcatcaaaacgtccaatatattcaatcgttccatcaggcaaaaagcggcctgcatcacctgttcggtataaacgctccccttcaaggaatggatgatcggagaatgctttctgtgtcagctcttgctgtttgtagtatcctctcgcaagacccgcgccggaaatacacagttcacccgccgcgccgatcggctgcatttgatttccgtgcaaaacaaatacttttgtgtttctgatcgggtgtccgattgtgatcctctctttttcattcagatgccgcaatattgttgttgccacactgttttctgtgggcccgtattcatttgccagttctgcagaaggacaaatcatttgactcaactcaagcagatcaggcgtgaccgcttcacccgcaaatgtcacaatacgaagactttttgcatcgtcagcagtcatcacttccaataacaccctgtacagggaaggaacaatgatcatgtggctgaccttataacgggctatttttcgcttaagggccagcacatccttcgcttcgtcatctgttgtcagcagtacgcacgcaccggataaaagcggggtaaataagctcgttacacagccgtcaaacacgtacgaaaacaaatggagggatatatcctgttcggtcatgtcatactcttcccgtctccattgcaatgtattggcaataccgtgatgatctactaaaacccctttagggcgccccgtcgttcccgacgtatagatcaagtaggctagatcacctggcggcatatttggagcttctgtttggtaactttctgtatgttctatcgttatcgtatttccttcataggacggagggatcaaggaaataaggtcttcttctatcagcaattgagccgcttgactgtccttcagcaggaaagaaagacgttctgctggaaaatgtggatcaagcggcatataagcgccgcctgctttccaaatcccaagcagagctgcaggcatttccattgaccggcccatcatcacagccacgatatctccagatctaacgcctttttctatcagggcgtgcgcaatctgattggctcttatatttaattggcgataggtccagcaatcgtctcccatttttaatgcagccgcttcaggtgttttgcgggcttgttcctcgaacaattggggtatcgttttgttcacataaggacgctcagtttcgttaaacgattggataacctgttgctcctccggcggcacgatattgatgtcactgacggcaacatcgggatttgtcaaaatgcaatccagtgcttgctttagatgcccctgaatcctcagcatctcctcccgctcgtaaacgtctgcgttgtagctgaatttgatataaaatgattctcccggaacgataacgatattaaagtcgtaattggtttgttccgacattgaaatgtcactcagcttcagagcgccttcgtcattttcactctccacgcttaatgcctgatgaagctgtacagggtaattttcaaaaacaaaaatatgatcgatcaacccttgcttcaatggactatggttttgaatttcataaagcggataatacccatgctgttcagatgataaaatatcctcctgcacggctttgaccagcgaagaaaacgttatgccttccgcagatcggattcgcactggaacagtattgataaacaagccgaccattgattcaatcccgtcaatcgctgacgggcgtcccgaaatgacggagccaaaaacggcatcggcatcatctgcagcattatatcgatggagcagcacgccccaaatactcataaacaacgtgtttaatgtcactccccagttttgggcagcctctgtcagtttctcaaccatttcctgcgctaatgaaaagctgacctggtcggctttataattcccgtctgccgtgcggcgctttattcggggaatagaagcagtattgccgtactccttcaaatattcgctccagtaggcagcggtctcttcttgatcttgttctccgagccattcaatataacggctgtacggcaccgtgctgccaagctgtacaggtgagttatttttgagcgaatcatacatgctgaaaaactctttaagaataatgccgagacaccacccatccatgatgatatggtgatgtgtccagacacatgtatattggctgtctcctctatcaaaaagggcaagacgcattaaaggatctttttgcaaatcaaatcctttttcccgatccttagtcataaaagcatcaatcagcgtctgctgttcttgatcagccaggcgagaaatatcttctctatatactgtcaattcccggtttgataagactacctgctgcggacctgtaagatctggtacttctttaatgaaaatcgttctgaaaatatcatatctagaaacaagaaggtttaagctcttttgaaacgagtcgacgcatagattccctgtgatcgtaaacgaggtctgttcgatatatgctttcgagctgaaatccattaatgaatgaaacagcattccttcctgcatgtgcgataacggataaatatcttgaatttgtgccgattgtgccatcaattccacacaccttttcaaaagttaaagatctttcacgagatcttcgatgctagataatgcagacaacgttaattccttattgctgaaatcgctcaatgttttttcgcgtgcttttttctgcgaacaatgctcaatcgtctcgataagatgcctgtgaaaacgatccataaaacactcaattgagtgtttgctgaacacctgggtgtataccgcttttacttgaagccgtccgtccgtaatgagagcgttaatgtccagctcatactctcgttctctctcacccgctatttcgtaacggggctggtaatatgataattgaaacgtatcagcttctttctcttcgctaaattgaccgagataattaaagctgacctcaggctctttatgccgcagttctcctatgtgtgttaacaatccgtatccagttcctttgttcggtactcttctcagcatatcttttgtcatcttaattcggtatgcgagctgatcctcgaaaggctcgggaatacccatgtctagcagaataggataaatggaagtaaaccatccaactgtccttgaaatatcaatgtttggcacatgcccttctctaccgtgtccctcagtgctgatcacgatttggtcatgcccagtccattcagaaagcgccaatcctaaagccgtaagcaaaagttcgttggcatcagtaccataggcttgctgggtttcaaacagcaatttttcagtccagtctccggatagtacaaacgcggctgcgtcgctattcatttggagtctgtccggcacattttctatgtccttaggaagaaaagcagtgtgagcgtctaaaatcgtttgccaatacgttttctctgaaagcaattgtttactttcagctatttgggtaagaccatcggcgtaggataaataagaatccgtttttggcggtaattggatttctttcttttctaaagcctgttgatatgctgcagctaaatcttcaagcagaattctccaagaaacgccatctatcacaagatgatgaagtgcaatcagcaaatgatccccttctgccgttttaaacaaacctgcttgcagcaaaggccctttttctacattcattttgctttgaatgacggtttcctcagcggcaagtttttcatcaagatgagccctttccagcgatgcttttgtccaatctgaaatataaaggccaaacagttcatgatccttgtgattgattccgcgattaaactgaatgacatggccgttttggtcacgttggaaaatcatgcgaatggcatcatgatgctcgattattttacgcagcgctagatgaagcgcgttagcattgaatcctttttcactgaaaagcatgacggactggttgtaatgatagtgaaaagcatgtacctgtccgaaaaatcttcgctgaatcggggtgagttcagcttcaccttccgcaggtccctggtccgcttgagatgccaatggtgtgatatgtccgcatagttcctgaatcgttgaataacggaataagtcgcgtattgtcatgctccagccttcagctgccagacgtgctgccacttgtaatgctttaattgagtctccgccaagctcaaaaaaggaatcgtgaatgccgactcgtgacatgctcagtacatcttcccatatatacgccatcgttttttgtatgtcgttaactggtgcggtatatggacgcgataacacattatttggagccggcaaggcatttctgtccagctttccgtttagggtcagcggcatgttttctaaaggaatcagatgtgcaggaatcatatacgctggcagctcctttgttaaagcagcacggagagcattcgtattgacgtctgaaggcacaatatatgctgccaaaccagcctgtccatttttatcatgctgaacggcaacagcagcttctctgacaagccccgtttgaagcagaacactttcaatttcttctgtttcaattctgtatccatttatctttacttgataatccattcggccaagaagcctgatcgttccgtttggaagccagcatgctcgatcaccggttctgtacagcctttctccagagacaaatggattttctgtaaatttcatttgcgttaagtcaggtttatgatgatagcctttcgcaacacctgccccgccgatgcacagctcgccggcaacaccgatcggctgaatttgatcagtctggctgagtacgtacatgtgtacattcggcagcgggctgccgattggtacgttatctcccgtacactctccacccatactggtttcatagaaactcgaatcaatggttgcctctgtgacaccatagctattaatgatgcgcatgctttggccaaagcgatctgtcaatgttttgaaatcttgagctttcaccatgtcggaaccaaggatcagcatgtctaagtcaggaagcttgaactggttacggtatacatactccatcaccgggataatgagagccggtgtcgactccatcaccgtgattctctgagagttcatgattttatatatttcagcaggttccagccgtgtttcatctgggcaaacgattagagtcccgccgttggtcaatgttctcgccaaatctcctgagaagacatcgaatgaaaagctcgcgatttgaagcagtctgacaggcttccgatccagttcataaatttgacgccaagcaagagcagcatgagtaaagttctgataggtgacaataacacctttaggcgcacccgtcgttcctgacgtataaatgatatataccggctcttcaggagcaggagataagttaaggttgcagttactttcttcataagtgctttcatcgtcaaggcagatatgagacatctcagattcaggcaagtttgaaatcaaatgcttcaattcctgctgtgaaagtagaatatctgccccgctatcacgaagaatatattcaatacgggcttttggataatgtgaatcgattgggatatacactccgccagctttcatcactgccagcactccaacaattgcatcaatggaccgcttggctaaaacagccacagttggcttcggtccttttctgttttgcaatgttcgtgccagacgattggctctttcatttagaagccgatagctaatctctgtttcgttatcaataacagctatatgttctggaatttcttcagctttcgcttcaaatatgcgatgaaaaggaacatctttttgagcaaattcaacctgagttttgttaaattcaaagactattttttgtttttctttatcactaagtatgtttatttgtgcaaggcttgtttcaggggttgaaagtgccgcatgcagaaattggataaaatgatcagcccaccgttcaatcgtagcttttaggaatacttctgtactaaattccatttcgcagcaaatagatccacttacttccgtagctattaatgtgatatcaaataaagaaatgtaatgtgcgaaattggcaggccggacttttatttctctcagatctatgtcctgtttttccacattttgaaggataaacatcgcatcaaacactgggttccggctcatatctcgtgtcaattcaagcttatcaacaagctgttcgaacgggtaatcctgatgctcaaaggcttccaatgctgtctcacgcacttcctgcaaatactgtacgaatggcttcccgccctccgggcgcgtccgaagcgccagcgtgttcacaaacatgccgagtatcgtctcaagatccttgtgcggccggccggcgattggcgagccgacgatgatatcttcctgtccgcttaagcgtgacaagaacgcggtgtaagccgcaaggagcaccatgtacagggtgcttccgttttctcgtgccagcttgtgaaggcctgatgcaacctcttgatccagcgtaaatgagaccttgtcaccagcgaagcttcgcaccggcgggcgggcatgatcagcggggagatccagcacaggcagctcgccctcgagctgcttcagccagtacgcctcttgcgttttgtacgcgtctcctgttttgaatccttcttgccatacggcataatctttatattgaatgcgcagcgccagaagcttccgattattgtacagctcgccgaattcttgaatcagaatgttgacggaaacaccgtctgaaatgatgtgatgcatatcaaccagcaacaggtgccgctcatctgatacctttacgatttgggcacggaacagcggcgcttggctgagatcaaacggtttgataaatgcggctgcggcctcctgttcggttcgttcgccgagaactgtagtctgtaacgtaaacggcacctcgtcatggatgcgctgcaccggatcgcctccttcgtcctgttcgaaggcggttcgaagcgactcgtggcgcttgatcagctcttggaaagctctgtccatcctttcagggttgagcttcccttcgagctctaacacagccggcatattgtagcctgtccctccgtcttccagctgctgaaggacataaatccgcttttgggcagaggaaaccggataggtttcctgtttttcagcgggcttaatcgcttcatatggactgtccgttccttcacggataacggcagccagtccttctactgtcggatgggcaaacacatcttttagcggcacctgtacatcgaattctttggcgatccgtgagacaagcgccgttgcttttaaggaatgtcccccgcggtcaaaaaagttgtcgtgaatcccgacagggccatttttcagcacgtcctcccacagctgagaaagcttcatctcagtcacgtttctcggcgccgtgtaggtctccgcatctgccgctccgccaggagctggcagggcgtttcggtcgagctttccgcttggcgtaaccggccactgttccatctctatcatataggctgggaccatgtagcccggcaacagtctctcaagctgtgcacgcacttcgtttctttggagcccttctacataagcgcataattccggctccccgctgtctgtccgtacggtaacagccgcctctcttacgccttctatgcttcttagtgccgcttcaatttctcccggctcaatccggtagccgcggatttttacctgatcatccgtgcgcccgaggaattcaacattcccgtcagggagccagcgcgccacatccccggttttgtacatgcgttcccccgggtaaaacgggtcttcaagaaaacgctcctccgttaatgccggccgattcaaataacctctggcaacacccgctccggcaatgtacagttcgccggcgacaccggaaggctgtacggctaaatgcggatctaaaacatacaaacgcgcaccgggtacgggcttcccaatcggaatccgcaaacgatccctgtcccgttctggatccaatacgtaaaatgccgcgtctaccgttgcttctgtcggcccgtaaccatggattaatgatacctgcggcaatacagaagcaaaacgggctgccgtacgcggcgcaagcggttcacctccggcgaatacacgcttcaggcttgtgctgtcacgcaacctttcgatttccgcttgatcgagaaagctgttcagcatagccggaataaaatgagccgttgtcacgttttcctgatgaatggcttttacgatcaatgccggatctttctcccagccgggcggaagcagatacgccgaagcaccggaaagcgaccaccaaaacagctgccacacagacgcatcaaaggaaaaagaggttttcaccatgacaatgtcatcttccgaaagcggaaactggtgctgcatgcctgtcagaaaggaaacagcctggcggtgctcaacggccactcctttcggctgcccggtagagcccgatgtatagatgacataggcgagagatccgccgtcagcaggagtaaactcatggttttctgctttttcgctcgcaagagatgtcatgtccacttcaagcgtttcgccagaaaagtttggtgcggagcatcccggctgtgtcagcaagagcgatgccccgctgtctttcagcatgtagctcagccgctcctttggatacgcaggatcaagcggcaaatacgcccctccggccttcaatacagcaaggacagcgatcagcatgtcaggtgaccgttcagacaggacaccgacgatactttcgtttgtgacgccgcgtgccgcaaggtgcgcagccagccggctggcgtacatatcaagctcagcgtatgtcagcgaaccgcctgaaaagcgaatggccagccgctccggtgtgaaagctgcctgtcgctcaaacagcccatgcagggtgaaagctttaggcgaaacagcttccgtcttgttaaactcatacaacaatttttgcttttctcttgtattcgtcatatctaattctcttataaagctgtgcggatgttgaagggcgttttccagtatggtaagcaaatgagattgtattcgtttaatatcctcaagagaaaacaaggtattttgatagtcgaaatttaattgaatggttccattgtctatccgttcttgtatttgaactgaaagctcattcgcggtgtatccgctgaaataaagcgctgtttcatagtcaaaatcatctgcattatgccactgaagtggctgatactgcatagatataccgataaggttgtgtaaatccttctgttcatttcttaattcatttacaagcaaattataaggaaaccgttgatgacgcataacagaaagctgttccctgcctattgtgcgcacaaaggaaagaaaatctgtgtcaggatcaaccgttattctgattggaagggaactaacgaacatgccgagcatttctttttcagcctttgaacctctgttgccatagtaggtgccaatggcaagatcttttttagaagtgattctgctgatgcatatgtaaaatgaagccataaataaggaaatgatattgatcttgtgttcttcgcagaagattcgaatcgtttgctctagatcaggtgaaagaatgatggtgtctctggatgcagatgtgctctgtttttgtaaggacgtctggtcggctaacgagtggtattccaacgggtgctcaaaggtttgtgtccaaaataaacggtcctttgcaaaccgcggagattgtagatattgactctctttttcgatgtagctcaagtaagaaggttccggctgatcaggtaaaggatctttctttttcattttttgataaagatctataatttgatttcccatcacatttaaagagattccatccattatgatatgatggaatttcgcaaatagccaaacttcatgagagtcaattctaaggaggtaaaattgaaaaagaggcgagttgaacagtttaaatggaatgctcgcttgatcctgaatccattgctctatttctatcatttcaacatttgaaaaatcaattattctaagtggataatatttatattcagtaaggtgcaatcgcggctcaagctcttctccttctaacagctgaaatctaatggcgtcgttgcgggagatggaatgattcagtgctccctccagagtatcaagctcaatattgcctttaaatttcacacaggctgtgagattgcaaatactggtatctggctccagcagttcggtaaaccacactctcctttgggcatgggttaaagaataagtatgttcgctcaacggattccctccagttctcataataagaggataagaaaatgtagaaaaaagcagaaaaatgacaataaaagaaattatatgactatataatccatatatgcactatattaacggatattttttaaagtacaataaaaaacattaaatttttataacatttttttgaatatagtattatttctttatttttcgtttctttttttatcaaatttccggatataaagtgataaaagtattgttttacataaggtcttatacactactttttaatcggactaatttgcttttgcccatcattcttctaattgttggaaggttcgacaaagcgttattacagacataaaaaaacctgttttctcttggaaaacaggtctgccgctattattgatttgccaaaatgacagcgatttgatcctcaatatcttttccatcctcttcatcaatcaatccatttagaagaatagagaaaacaagtttttttccgctctttgtttctgcgtaccccgatagagagcttaccgtactgagcgatccggtttttgctcttacttttccttgtgcaggagtgtctttcatgcggtttctcagcgttccgcccaccattctgtcaggattgcccgcaacaggtaaagaatttagataagccgagaaccaactctgatcctgaatgtcatataacagctgtgaaagttgatctgaggatacagcatcaatatgtgagattcctgatccgtctcttaagacgagtgatttagaatcaacaccaaattccggaagcgtactgtttaacacttcgagccccttttcccagctcccttctccttttttcactttccccatctcttttacgagcacttcggcatgtccgttattacttaatttcatgaacggcacaaaaagtttcgataaaggcattgagcgatgagagagcagcacatctgaagaactaggtgcttcacccgtcttgatgtcccctttcacagtaataccttgtttttttagtgactgcttaaataaatctaaggcatatccggcaggctcccagacagaaatccattcctttgtcttgtttgcgtcaaccggtacgctcccttcaattgtaatcgtgtttgttccatgctctctttcgattgtgaggtctttctctgaaccggcagcagtcgtttcagcatcgttctttatcgttatataatcggttttcggagagacagacacggcaggctcttccccttctttttgatttggggtgacctcaacaatcacagtgcctgcatcatagtcttcgtttggagacgctgttagagcggagattggcgcgccataatatgtgtattcatcgctccaaggcatatcaggtgataatcgcatgtcatcatgccacgtatcatcaccgatcagattgcctttaattacttttacgccggaatgtttcaatttctcagccattttgtcaaaatcagatggtaaaagtgtcggatcgcctttccctttcaaataaaggttaccattcagctttttccctttcagtgttccatccgtccggacctcggttgtaaaagaatagttctcgccaaggacagaaagtgccgcggccgctgtcaaaagctttagagaagaggcaggcctcattcgggtgtctcctgaatgttcatatagaacagcacctgtttccgcagagcgaacggtgatgccggccattgcgccttcgagggcaggatgatcagctaaaatcttatcgatctgcccggaaagtgcatcttgtttttcagcggcaagcgcagcctgatgcatataaggcaccgaagcaacgacgaaaagcagtaaaacagcaacataaagctttatgctttttttcattcatttccccgcctctctgcgcttcatcattggctattgatgattcagttcaatggtgatactgcttttagctgtcgtttcttctcccggctccagcacttgtaaaccagtgagtgacgaaggtaaatcaagattcactgcgtttgtcacccatgtgtaaggctcagggcataaatacccttgttttccgtccgcattgtatacaacccaatgtttaaactgttcatctgccttataaataatgctattatgtgcatgctgatgataaatgactgcctggttttctccgcccctcttctgataagaagataaaaagacatcatccagctgcttgtggcgcaaatccattccttcatgcaaagcttctttatacgggacatccatcagtttccctgtcggcagcaggcgttcatccaactcccattgctgatctgctgtcagggaaaataatgagctttctgccggaaatataaatgtagtatgataaccaattccccaaggaaacgcttcctttcctttgttcatgaccgtcgcatgtttaaatagagtattcccctttaccgtgtatgtcatccgaacgacggcatggtgaggaaattgcttatacacatgggggagcccagaaagatcaatttctgtttcaacaatcacttcttcatcagttttcttcgcggtcactacgttccacttttcatggtaaagaaacccatgaagatggttgtgtttatccttctcgttgatatcaaaatgatacgttctgccccggaaactgaatgtaccgtcacttatgcggttaggcgggaacaggattggaatgccatacaatgttggtgtgtcgtgaaaactttctgctgtttccggttcacgcaaaagctggacatttgttgttttgtccacgagagaaatgacgttgctcccccactcagggacaacaatcatttctagatgttcgttgcccgctttgatggccggcgttcccaaatacgtgattttctcaataaagtttgccatgtttactcaacctctccttgattcattgctagtataagaattcaatgtactgtaccatatttcctccattttatattttcccctatcaaataaaaaaacaccgttcaaacttatgaacggtgtgattcggaggctattggatgagacgtgtgatttgtttctttttccagacgaattgataatacccataaatcaacagcaagctgacggcaaacgcagctggataaccaacccagacgccgagtatttcaagctttgtatagtgagaaaggacgaaagcgacaggcacctctactccccagattgcaaaaatactgatgacggtcggccataaaactgttccgcttgcccgcatcgttgcagaaataatttgggcatttccaaacagcaaatagctccacaatgtaatcatcaaaagacggtgcgcaatgtaaagcgtctcttgctcggttaaaaataacgataaaatctgatgtgaaaaaacatagatcagaatgatcagtacgccgccaatgatataattcagccaaatccccacgcgaatgacctgctttaagcggtcaaactcgtttgccccaatcgattgcgcagcgaaaatagaaaccgcaataccaaggctgacggccggcatctgtacatagctggctacctggttgaccactccgtatgcagctgttgcattagagccgtaatgattgacgaatgaaataaccgctatctctgataatgagacaagaatcatattgatgcttgctgggaccccaagacgcagcaggagaaccagcagttccttatccattttcaaataacgacgcactgttttatcaaattgcagcgggtgttttcgctttcgtaaatacaccattaacacgagaaaagtcgcaatcgtggaaatgacagttgcatatgccgagccgtatatgcccagtttcggaaaaccaaacatgccaaggattaaaacaggcaaaagcgcgatgttgatgaccgtgctcacaatcagcgtataaaacggtgtcttagaatcccctgttccgcgcaaaaaggtagtatatgcaaaatataaaaacataaacggcatagcataaaataaaatacgtgcatagttagcgctgacatgaatgacattttcaggcgttcccattaaacgaaggatatccagggtgaaaatactgccgatgacggctaacacaacgcctaataaaaatgtaaacgtgagcgtcgtcccgacaacagcctttagccgttcctcatttttcgctccgtaagcttgtccgatcagaatcgaactacctgaaccgatcccaatcgtaaatgagattaaaagaaaaaataacgggaaaaaggatgatacagctgccactgcatcaacaccgagccatctgcctacagccatcatcccgactagctggccgactgattgcagcacattgctcagcagaagcggcaccaaaaagagtgacatcgaccgccaaactgatggtttgcttttcttttgagttacaagaggttcttgtgatgtttccatattaaaggactcctttatttgaaatcgtttttaaacatgccctcattttttgacaaaaacaggatatgcaacatgttattattcatcactgcacatatgaaacccttcccgattcttctaatttcacacatctttttagcttatgaagaataaactagcaagtaatggcgtattttttgtgagtaaaagaataaaaaaataatttatgcaaaagtattgtaatctatccgtaattattgtaacatttgtaacataagagaaagagattttgaaggagagagcgataatgaaaaaatgtcttctatttctaacaaccattgcacttattctgtcattaagcacaaatgcatttgcgaaaaatacatcaggcaatttatcacaaaaacaagcattacagttggcattatccgctagagaacatttttggaacaccatgagcggccacaatccgaaggtgaaaaaagcagtttgcccatcaggcacattcgagtatcaaaatcttcaatatgtatacatgtgcagtgatctaggcactaaagcaaaagcggtgaattatttaactcctatttttacaaaaacagcaatcgaaaaaggctttaaagattatcatttcactgtttcaaaaggaaaacttgctgttccaatcggtgacggagacaatcttttgaattggaaaaaatcaactgctaaactgatctctaaaaaaggcagcacaatcacatacgaatttaccgtccctacattagacggatccccttctgcaaaacggaaagtgacatttgtgaaagaaaataaaaaatggaaagtcaatcaatttgacgcagttatataagaataacgcccggtataagcgggcgttttttatttggtctgcataaagaaagacaacaggcgaaaagtgcctgttgtctttttgtgaatataacgctctaggagagattcgaactcccgacctgcagtttaggaaactgctgcactatccgctgtgctactagagcttttggtatttatatagtagctctgatgatcaatattttcaagcgatttgtattaaagccctccaaaaaccttatatgcggctcttgtcgtatcttcatcaataccgatataccgcattgtaattgatggtgatgaatgattcagtattctctgcagctcggcgatgtctttcgttcgctgataaaaatgatagccaaacgttttccggagtgtatgcgtccctatctcctcaagtccgcacgccgcagcggcctctcttaaaattctgtaggcctgaatgcgggaaatcggcttcctggtgcgcactgatttaaaaagatattcgttttccttcatgtctttcgtatactcgtatatttcctgtttcagcgattctaaaataagaatctttcttttctttttcgttttgctttcagtcgcccataaatgatctttattttgaacgtccttcacttgcagcggcagaatatcagaaatgcggagcgcgctgttgatgccgaaaataaacagaaaataatcccgcttgtttttgttaagcaaatactgtttgacttcttggattttctctagactgcgaatcggctgtacaatatgcatcaaaaaactccttaaaaacagttatgtaacgttttgaggtctatgttactattatagctgaaaaacgttgaatgtcaaagtgcggcggcgtttatgtaacataatatacatagtgttacataagcttttaaaaaagcttcttcaaaccttcaccctataaaataagctttaaagcctcttataaagcttttaacctcttggatacttatccccctactaatcatcaaaaatcctcttaaaacgcaatctgacgctcccaattttctggagcttccgcaaaaaaacataaaaaaaagacacaacttcaaattgtgtcctaatcctcatcctttacatcaatatcttccgggattggttcatttaatatttcctgcacaagtgctttgtaattctccagctgttcgagatgcgttttgaactgctctttataaatcaaaaattgctctccgtcatgaacggctctgattttcccttcgagcaccaagcttttaatataatcctctgaaagatttgtatattctgctgtttcttcaatcgttaaatacatatagcagtcccttcttaatccgtatgctgattctaatatagcacatggctcatatcaatataatcaattttgcacagaaaaacggcattatgcactatataatataccatttgtcacttgtgaaaacgctgtaatttttttacgctaagattgtaacaatacagcttcatataggagggagaacatgaaaagaacgtggaacgtctgtttaacagctctgcttagtgttctgttagtcgctggaagtgtcccttttcacgcggaagctaaaaaaccgcccaaaagctacgatgagtacaaacaagtagatgttggaaaagacggcatggttgcgaccgcacatcctcttgcttctgaaatcggtgctgatgtgctgaaaaaaggaggaaatgctattgacgcagcggttgccattcaatttgcactcaatgtaacagagccgatgatgtcaggtattggcggcggcggttttatgatggtgtatgacggaaaaacgaaggatacaacgataatcgacagccgtgagcgtgctccagcaggcgcaactcctgatatgtttctggacgaaaacggcaaagcaattcctttctctgaacgtgtaacaaaaggtactgccgttggtgttccaggcactctgaaagggctggaagaagccttggataaatggggaacccgttcgatgaagcaattaattaccccttctattaaactcgctgaaaaaggctttccgattgattcggtgttggcagaggccatttctgattatcaggaaaagctttcacggactgccgcaaaagatgtatttttaccaaatggcgaaccgcttaaagaaggagatacccttattcaaaaggatttggctaaaacatttaagcttattcgctccaaaggcactgacgctttttataaaggaaaattcgccaagacgctttctgacactgtccaggatttcggcggatcaatgacggaaaaagatttagaaaattacgacattacaattgatgaaccgatttggggagattatcaaggctatcaaatcgctactactcctcctccaagctccggcggtattttcttattgcaaatgctaaaaatccttgatcattttaacctttcacaatacgatgtccgctcatgggaaaaatatcagctgcttgctgaaacgatgcatttgtcatatgccgaccgtgcgtcttacgcaggtgatcccgaatttgtaaatgttcctctcaaaggcctgcttcaccccgattatattaaagaacgccagcaattaatcaacctagatcaagtgaataaaaaaccgaaagccggtgacccttggaaataccaagaaggatcagcaaactataaacaagttgaacagccgaaagacaaagtagaaggccaaacaacccactttacagttgctgaccgttggggaaatgttgtttcttatacaacaacaatcgaacagctattcggaacgggtattatggtccctgattacggtgttattttaaacaatgaattaacggattttgatgcgataccaggcggagctaacgaagtacagccaaacaaacggcctttaagcagcatgaccccgacgattttatttaaggatgacaagcctgtcctcacggttggatctcctggcggggccacaattatttcatccgttttgcaaaccattctctaccatatagaatatggtatggaattaaaagcggctgttgaagagccgagaatttatacaaacagcatgagctcttaccgttacgaagacggagttcctaaagatgtcctcagcaagctaaatggcatgggccacaaattcggcacaagtccggtggatatcggaaacgtgcaaagcatatcgatcgaccatgaaaacggcacctttaaaggtgtagctgattcaagcagaaacggcgcggcgatcggcattaatttaaaacgtaaataaattaaaaaactgtactcgcttcaaatgagtacagttttttatacacatctttaaaataaaaactgacaaacgtctttattctgctaatgcacgtctatcttcatcttttcatttcgtttatctcatcaagaaatgtctgaaacgcactcgtaataaaaaagtctttcctgtatataaagacgatctctaagtcttgatatgctggtggcagctgatgaatccatacatttgtacgatgctcggagcagtcaacagcggactttgggagcagcgccgtacccatcccggcggaaacaccttttataatagcctccaatgtgccaaactctatgattttttgattgtgtatgcctgcttcctctagtaatcttttgaccctgtcacgatgagaacagccagccccaaaaaagagcatcggctgctgaagcatgtcttctgccgtcccttctcgtgatgaaatcaaaactaattcatcataggagacatggagttgtctaaccgcagcgtgttcaaccggcccatatacaaaagcgccatcaactttatgatcaagaacctgttgaatcaaatgatgcgtatcagctgtgttcactgataaatccacttcaggaaaacgcctgaggaaggatgctgcatgctcaggcagatgcgttaccgccgtcgtttccagtgatccgatccgcaaaggcccttttggttgcctgctcattcgggtcgatttttcagcttggtctaacagcgataatacttgatctgcatattgtaaaagattttctcctgcagcagtcagcttcattccccgattcgttcgatgaaaaagcctgatattcaaatcttcctcaaggttatgcactctggctgtcacattcgactgaacataattcagcatttgggctgctttcgttatgcttccttcgcgggcaacagcctgaaaaatctttaaatctccgctttccacgcgctctcacctgcttgctatgatgaaaagtgatattggctatcatatttgttcattttactcgaagaaaaccgctatgtaaaatatgtaaagatatgaaaatacaattcaatgaggaggcagacagcatgaaagctataattcacaacggaaaagccggtcttctggggttatcagttcaggacgttccatcaacaaagcctggatacggagaggtaaaggttaaattaaaatctgcaggcctgaatcatcgtgacttgtttcttatgaaaaacaaatctgaacaagatcctcacataatactgggttctgacggcgcgggtatcatcgaagagattggtgaaggcgtgaaaaatgttactgttcagacagaagtagtcattttcccgacattgaactgggatttgacagaaaatgttccacctgtacctgagattctgggaggtccttcggacggaacacttgctgaatatgtgatcattccttcacaaaatgcaatcaaaaaacctgcttatttatcttgggaagaagcgggcgttttacctttatccgctttaactgcatatcgggctctgtttacaaaggggcaattaaaaaaaggcgagcatctattgatacccggcatcggcagcggtgtagcaacctacgctttatttatggctaaggcgattggggcaacagtaagcgtgacctcccgcagtgaggagaaaagaaaaaaggcgctgaaattaggtgctgattacgcatttgacagctacagcaattgggatgagcagttgcagggaaaaaaggcggatgttgttcttgacagcataggacctgccctcttttcggaatacttccgccatgtaaaaccaaatggccgtattgtcagctttggggcaagctcaggggataatctcagttttccggtgcgttctctattctttcctcaggtcaatgttttgggaacctcgatgggaagcggtgaggaatttcaagctatgctcgctttcattgataaacataagctgcggcctgtaattgaccggatatatcctttagaaaaagcatgtgaagcatataaaagaatgcaggaaggcagacagtttggaaacatcgggatcgtaatggaataaaaaaagaaaccggctggcagccagaccggtttctcttatatgataatcccctttatttacggaagaactgaactccccatcaaatatcgatccacttcacgcgccacttctcggccttcattaatcgcccatacgattaagctttgccctcttcttgcatcccctgcggcgaatacaccatcgatatttgtttgataatccccatatgctgcactgattttgttatttacagaatcaacaccgaactgtttcaacagcggctgttctgtgccttcaaagccgatagcgataaagacaagctgagcaggccatactttttccgttccaggcagctcgcggaactcgtatttcccatgctcatttttcactttttccatttggatggtatgaagctctttcagctttccgtttttatccgcaaccatttttgtcgtttgaatggagtattctctcggatctcttccgaattttgcttctgcttcctcgtatgcatattcaagcgtaaagacgtgtggctgttcaggccacatattgtcattcgtgcgggctggcggaagtttcgggtgtttgccgaattggtgcacgcttttggctttttgacgcagagcagtagccacacagtcagctcctgtatctccgcctccgattacgatgacatccttccctttagcatcaatgaattgcttgtctttaaaattagaatctaaatagctttttgttgcaagtgtcaggtagtccattgcgtaatggactccttttgagtcgcgtccttcaattaagaggtcccgctgtttttgagcgcctgtgcataggatcacagcatcaaattgctcctttagctcatcagctgtaatatcaacaccgatttctgtgttcgtgacaaaatcaattccctcttgcgtcagcaatttaattcggcgttctacaatgcccttctcaagcttcatgtttggaatgccgtatgttaaaaggccgcccgctctgtctgagcgctcaaaaacagtgacagaatgccccgcttgattcagctggtcagcactcgccagtccggctgggcccgacccgacgatagcaacttttttgcctgttcgtttttttggaattctaggttgaatccagccgttctcaaatcctttatcgataatggtccgctcgatgtttttaattgatacggccgggtctgaaatcgctaaagtgcatgatccttcacaaggagcgggacatacccgccctgtgaattcaggaaagttgtttgttttcaacagacgttccaatgcttccttccatctgccccggtagacaagatcattccattcaggaattaagttgtaaatcggacagccggatgtaaatccgttaatgtccgcaccgatctggcaaaacggtgtaccgcaatccatacaccgcgccccttgccgtttcgatgcttcttctgaaaaaggagcagaatattctttccaatcctttaagcgagtgagagggtcccgctccgcaggtttttctcgtttgatctccataaatccagttggtttccccatgttcctctccccttccttactgtactaccgcttgtttttgtcccgatgctgctgtattctgctttggcttcgtgttggcctcaaaagcgaacatgatggcttcttcatctgataaacctgcagctttttgctcttcgatgcttgcgagcatttgtttatagtttttcggaatgactttgacgaattttttcacactgtcttcccattgatctagcagatcttctgctttttggctgtttgtatacgcagtatgtctttcaagcattgctttgatttgctggatttctttctcatcctctaatgattcaaataaaatcatctcaaggttgcatttgcgtttaaacgctttgacatcttcggtcagtacataagcgattccgccggacatacctgccgcaaagtttttgcctacatcaccgagaacgacaacgctgccgccagtcatgtattcacagccgtggtcgccgatgccttctacaactacgttcacaccgctgtttcgaacggcaaagcgttcaccagcacgtccgttaatatatgcttctccgcttgtcgcaccgtaaaaagccacgttgccgataatgacattgtcatccgaagcagagttgaatccttctggtgacttgacgatgatttttccgccagaaagcccttttccgacgtaatcatttgagtctccgtctaaataaagcgtcatccctttaggaacgaaagctccaaagctttggccggctgatccggtaaagtgcaacttgattgtatcttcaggaagaccttcttctccgtaacgctttgagatttcactgccggttatcgttccggctacacggtttgtattgttgatttcgatagaaacttccgcttcttttccagattcgatggcttcttgtacggccgggagaatcgctgtaatatcaagtgattgatcaattttatgattttgcggcgattggaacgtccgcaccccatcaggctgataaagaagggtagacaaatcaagctggcttgctttccagtgctcctttgcccgttcacttacatgaagtacatcagtgcggccgatcatttcatcaaatgtcttgaagcctaacgcagccatatactcacgaacttcttcggcaatgaacagcatatagttcacaatatggtcaggatctcccatgaactttttgcgaagctctggattttgtgtcgctacaccgacagggcatgtatccaaatggcaggcacgcatcatgacacagccgagtacaactaacggagccgttgcgaaaccaaattcttcggcgccgagcaaggcagccatcacaacgtcgcggcccgtcatgagctttccgtctgtttctaatacaacacggtcacgaagtccgttcagcattagtgtttgatgtgcttctgcaaggccaagctcccacggaagccctgtatgtttaatactggttttcggagaagcgcctgtacctccgtcatagccgctgatcacaatgacatctgcagtcgctttggcaacacctgcagcgattgttcctacacctgcttttgacaccagctttacgctgattcttgcgtcacggttggcatttttcaaatcgtggatcagctgggctaaatcctcaatcgaataaatgtcatggtgtggcggaggtgagattaatccgacacctggcgttgacccgcggacatcggcaacccatggatataccttgttgccaggaagctgcccgccttcacccggcttagcaccttgagccattttaatctgcagctcatcagcattgacgaggtaatggcttttgacaccaaaccgtccggatgcaatttgtttgatcgcacttcttctatcatcgccgttctcatctggaacaaagcgtttgggatcttctccgccttcaccgctgttgctttttcctccaagacggttcattgcgattgctaaagcttcgtgcgcttccttactcaaggacccgaatgacatcgcacccgttttaaaacgtttgacaatcgattcagcggattcaacctcctccaacttcaaaggcttgcggtttccgtcaaatgcgaacaagttccgcaaaaatccgatgcgttcttcatcagccgcttttgtatactgtttaaacagattgtaatcatttctgcggcacgcccattgcaaagtatgaatcgttttcggattaaacgcatgatgctctccgccatttctccattgaaagtcacttcccggttcaagcgttttgctgtaatcatcctgatacgcttcccggtggcggcgctgtgcctcttctgcaattgtttgtaaatcgatgccgcctagctgtgatgcagtacctgtgaaatagcggtcgatcacatcgcggctgattcctaccgcttcaaagatttgggcgcctctgtagctttgcacagttgaaattcccatcttggacatcacttttacgacgccctcagtaatgctttttccatatttgctgaccgcttcttcatagctgatatccaaacggccttcatcaatttcctgcttgtaggtcgcataagcgagataagggttaatcgcatctgcgccataaccgattaacgctgcaaagtgatgcacttcacgtgcttctcccgattccacaataatgctgaccttcgtacgcagccctttgcggattaagtgctggtgcagcgcgcttactgccagaagcggcggaattggtgtcagtcgttcgttcatctttttgtctgataaaattaacaaacttacgccttggctgatggctttctctgcttgtgtgaacatgtcctttaatccgcgttcaagatcctctgaaaacagcacatcaattttttggctttttaaatctggatgaacaatcgttttcaatgcgtaaaactgttcattggataaaacaggtgtatacagtttaatccggcgaacatttcgttcacttggatgaagaagatcgccttccgcaccgagccaagtcatcgttgaagtgacaagctgctcacgaatcgcgtcgattggcgggttcgttacttgtgcaaacagctgtttaaagtagttaaacagtgattgcgctcggtcagatagtacagcaagcggagcgtcattccccattgaaccaaggggatctttgccttctttaataacaggaattagatacttttggatatcctcatatgtgtatccgaatgccttctggcgagtaagaagatcactaaattgttcttcttctcttgactccggatcaggatttacttgtacaagctcttcttcaagccatttttggtacggatactcagttgcaatttgtgttttgacttcctcatcggagataatacggccttcttccaggtcgattaaaagcattttcccaggctcaaggcggtttttatataaaacgttctcctgttcaacttcaataacgcctacttcagatgagaaaataatataatcatcttttgtgacataataacgggccggacggagaccattccggtcaaggattgccccgatttgtttaccgtcagtaaatgaaatggctgtcggtccgtcccaaggctccatcagggagctatggtactcgtagaacgcccttttttccttggacatatgcgtattttccgtccaaggctctggaatgagcatcattgccgtatgtgccggtttgcgtccagccatcacaaaaaactcaaatgcgttatccaaaatggaagagtcactgccatcagcattgagaatcggcaaaatcttgtttaagtcctcaccgaagctttcagaaacaaattgctgctcacgtgctctcatccagttgatatttccgcgaagggtgttaatttcaccgttgtgaaccaaataacggttaggatgcgctctttcccatgtagggaatgtattggtactgaagcgtgaatgaacgagcgcaaaagcagaaacgaatgcttcgtcttgcagatcagaataaaatgcatcaacctgttcaggtgttaaaaggcctttgtaaacaatggtctggcttgaaagactggcaaaataaaaatcaagatcttccgttactccccaattttcagcctgtttacgaatgacatacaattttcgttcaaaagataaattgtcctttagatcagaacttgcgccgataaatacctgacggacaaacggacagcttttttgcgctactgttccgatttttccgacatttacaggtgcagttctccatccaagaacgacttggccttcttgttcaatcagtgcattgatttgcttttcaattttttttctttcatcttctttctgtgagaaaaagaccattcctaccccgtaacgttctttttctggcagattgatgtctttgcactcttttctaaagaaagcatcagggatttgaaccagtaagccggctccgtctcctgtatccggatcactgccttgccctcctctatggtctagctggcaaagcatcttaagtccttgtttgacaatgtcgtgagtctgcttgccctttaagtgtgcatataggccgattccgcatgcatcatgttcaaattcaggacggtagagaccttgagcttttggcatttgattgtacgtcataattcctctcccccgatcaatttccgataataccggtcataaaatctaacaactctataatcattgtaggttttcaaaacgatataaacaatatataatttagatcaaaagaatctcaaaatgagatagatggatgtgagacaaacatggagctgcgccaactgcgttatttcatggaggtggctgaaagagaacacgtttcagaagccgctgatcatttgcatgtggcccaatcagcaatcagcagacaaattgccaatcttgaagaagaattaaatgtgaccttatttgagcgtgaagggagaaatatcaaactcacgccaatcggaaaagaatttttgattcatgtgaaaacggcgatgaaagccattgattatgcgaaagagcaaattgatgagtatcttgacccgcatcgcggaacggtaaagatcggctttcctacaagcctcgccagccagcttttgccgactgtcatttcagcgtttaaagaagaatatccgcacgtcgaatttttgctgcgccaaggctcctataagtttctgattgaagctgtcagaaaccgcgatattgatctggccttattaggaccggtgccgacgaatttctctgacataacgggaaaaatattatttactgaaaaaatttacgcgcttgttccattaaatcatccgcttgctaaacaaaaaacggttcatttaatcgatttgcgcaacgaccaatttgtattgttcccggaaggatttgtacttagagagatggcaattgatacttgcaaacaagcaggctttgctcctctcgtttccacggagggtgaggatttggatgctatcaaagggttagtgtccgcaggaatgggcgttacccttctgcctgaaagtacttttgctgaaacaacacctcgttttactgtgaaaattccaattgagttccctcaagtaaaacggactgttggaatcattaaaccgaaaaatagagagcttgcgccttctgcgaatgatttttatgagtttgtcattcaatttttctctaagctggagcagtatcaataaaaaaatgaacccgagcttctatatagaagcttcgggtttttttctgcaaattaatttacaggtaaagaaaaatccacatggcaaacaaaggcttcttgatcaattagagctctgtttgtcagttccttgttcttttccggttcttgaagctgtacagaagagtaattgacgattccaaggccgatttccgtcccttttgaatccattagccgaacaactgaaccgcttttaaatttccctttaatcttctgtacaccgtctaggtataaactcgattggccgtttgttatttttcgtgaacaatcatctgataaaatcatttcaccttccggaccggaattaaaagcgatccattgctccttttgattcaacggaagcgttccttctgcttcaaaataggtgccttccgcctgttcatgaacggcgtgatataaaatatcgccggcatctgcctgaccaaggaaacctttaatgccagacgccattacgattttaaacgcatcaagcttagagcgcatgccgccggtgccaacgatgcttccagtgtcacctgcgcatgcttcgatgtcaggtgttatttcactcacccgctgtatccttttcgcttctggatttgtgcgcggattgccgtcatataatccgtctatatctgataaaatcacaagcatatctgcatcaatcaatcctgcgacttttgccgcgagtgtatcattgtcgccaaacttgagccgattgacggtaactgtatcattttcgtttatgatcgggatgatgccgcgctcgagcagtacattcattgtattcctgacattgttgtatcgatattcatctgaaaaatcgcttcttgtaattaaaatttgggatgcgacatagccgtgtgccaaaaacagctttgaataagcctccatcagcaatccctggccgattgaagctgatgcttgtttttctggaagcttctcgggcctttggataaatccgagtttccgatatcccgccgccactgcgcctgaggaaaccaaaattacttcataaccggcgtctttgagtttgacgacctggtcgaccaacgcttctaattttcgaatgctgatttctccatgaaggcttgttaatgaactgcttccaatcttcacaacgactcttttcatgcttgtatcaggcgtcactttatcactcctgatagcggcgctgcagttttttcgatatcttcgctgatttcctttgaacgcttagccgcatgctttatcgcttgagaaatcgcttctccgccgccgctctttttcaaggcttgcagccccgctgctgtcgttccgttcggtgacgtgatattatctcttaagatctcaggatgttctcctgtttccatgagcatttttgcggcacctaaaagtgtctgtgcgccgatgcttcgagataactgtttatcgaggccagcttcctcgcctgtcttttcaatgaattccattaaataataaaaatacgcggggccgctgcctgcaattccggtgaatatatccatttgattttcttggattgtatagacttcgcccatgcatccgagcaatgcttcggccagcttcttcaggtcttccgacacatattttccaagggcaatagctgttgcagaagcgccaatcatactggaagtgttgggcatcactctgacaaccggctgttcattaagcaatgattgttcaataaaagaggtagttatgccggcaaggaccgacaatattaattgatggggttgaatacgtgattttagtgatgacagagcgttttcggcgtcttttggcttcattgccaaaatgagcacatccatgtcttcaatacatagttggttcggcaaggcgcctttaatgccatattgaagttcaagttcagttaatcgctctgtattgctgcggtttgtaacgcagatgttttgtttcgggattttgttggcacgaacgatacctgatatcattccttccgccatagatcctgctcctataaaggctactttcttttgatcaaagatcggtaacatctcctttgttcgcttttttgttcgcattttcacacgtttaaaatgttaccacgtgaggaaatgatgtcaagtttgaaggtcatcattgatttgtattgtttcttttcgacaaatatgtataatgaaaagcagaaaacacccggttcacactgctgcgccgggtgtttgtttctattaaaaattatctgagagagctttttcaatcagttttttacagcgatccagctctaccttcagctgttttttatatagcttggcggcttcgtaatctttaaattgatagaggacgacttcctggagcttagccccttctttttttactttaatttgttttagtatcccgtcatcaagaagctcatgcaaagaccggtatacttctgtatgatttggtttaaaaccaatctctttaaattcagaccgaagtacttcaagcagctttaacccatagagtctctcttgctctgtcatcgttatcatataaagcttcaaaaatgcgcgctgtttcactaaaaagcctgttgaactccttttttcttctttcatcatatgcactccttcttctgtcactgacaacactatgtactaaatattcaattttcttttattgttttccttctttatattaaagactgatagtccagtcatttcatatttactgattataggtgtagcggaaaaaataaatttcgactgaacatttggtacatagttttcttagttctattatagcctgcattcactgccagcttcaatttaaaacgattgtcagatttgcatatgccggtatgaatttcattcaaataaaaaaacctgtcgaaagacaggttttcatttttaaggatttgttgaccataatcccgctgttttgatgaaaatgcgtggatctaatttcaattgtgccaccatgtactcagcaagatcctcaggctgcatcactttttcagggttaccgtctgttaagttcaattcgatagacatatcactagcgacagtgctcggcgttaacgcgctgactctgatattatgttttctcacttcttgcataagagactctgttaaccctagaacggcaaatttagaagcgctataagcacttgttacagcagctcctctttggcccgctgtagacgaaatattaatgatatctccggctttgcgttcgatcatttccggaagcaccgcgcgagtcacatgatacacacccattaggttgacttgtataatattttcccattcatcggctgacagatctaagaaaccgccaaatttgctgattcccgcgttattaatgagaatatcgatatcaccaagctgttctttcacttgagcgacggcttggttaacctgctcggcatcttttacatctgcagcagcaaatgcagcttttacaccaagcgctttgacttcttctgccactttttcaacattagcggcagtccggccgattaacccaatatttacgccttctttcgcaagagcaagagctgtagcacggccgatccctctgcctccgcctgtgattagtgcagttttatgttgtaaactttgcaattgaagcaccctttctttgtttacatatgtacgatatcacattataagtacaatacatccaatacgcaaatcaaacgaactgtgtaaatatcatttcttctgattaaaaaagcggatacagggtaatgacataagaaaaggagtgaacatatgattatagtttatatcagtcttgtagtattagcagtttctattatcttcttaggagttaccgtgattcaaaacaagaaaaaaatggaccctgcactaaaggagctttcctctgttacgcaggctatgcaaaaacaaatcgaaggattaaaaacagaaacagagctgctgacgcaaaaacaaaagaagattcagcaggatgtccaaataaaaaaatacacgtttcagcagaccgcagctgaagtgaaagaagttccccaagcagtcaaagaggtgtggcaggcaggacattttaatagcagataaggatgaatgagatcccgttgttacgatcagaatggacaaatgggatctcatttttcgaggaggcttacacatgattataaaccgcagctgcttaaaagagttcgcagaaaaagtacattttcttccctcttcacttacaaagtccgatttacttactgatccatttcgtctccatcaagaaaacgaacttggcatctactattcacctcataatgaatttatcaatcgggatgcctcgcttgtgattgccgggatcacgcctggtttttcccagatgaagacagcgtacgaaacagccgccgaaagcctgcggcaaggcgggactcttgagcaaatggcagtagacacaaaaatagcagcgggtttctccggatcgatgagacataaccttattaccatgctggatttatgcgggctgccgcaagcttttggcattcaaagcgccgcaaagctttttggagaattacggcatatgctccatacaacttccgttattaaatatcctgtctttatccagcaaaaaaactataccggatacaaaccggctatcactcattctcctatcctaagcacttatgcttttgggcacttccctgcagagcttaaccatgtgacgggaccagctcttctcattccgttaggaaaagcggccgaaacagtgtgtgaaacattgatcagacagcacagcctccagaatttgatttgccttaacggctttccccatccatcaggcgcgaacggccatcgtttgaaacaattcagcaaaaacaaagagcaactagaaagacaaattcgttcctttgctgcattggttgatttcgctatagaaaagaggaaataaaagggatatgataaacaaaaacacaaacgtggggagtggttgaatgtttcctatattagaaacggatcggcttatacttaggcaaatcacagatcaggatgcggaagccatttttgcttgtttctcaaacgatgaggtgacacgctattatgggcttgaaaacatggaatctatagaacaggccatttcaatgattcaaacgtttgctgccctctatcaagaaaaacgcggtatacggtggggaattgaaagacgggacactaaagaactgatcggaacaattggctttcacgctctggcccaaaagcataggcgcgcggaaatcggttatgaaatcatcccggagcattggcgaaacggatttgcatcagaagtcatttcaaaggtcgtatcttacggattttctgcccttggactgacgcgtattggcgcagttgtatttaccgctaatgaagcatcaaatcggctgcttctaaaaatgggttttcaaaaagaaggcgttttaagacagtacatgtatcaaaatggaattccaaacgatacaaatgtatattctattttaaaatcaagcaaatgaacggacgacattctctcaatctgtatgcacactcccttcctcttcttggtgactgcccaaaatagaaggggcagccagcctctgcaccgactccagtatgggacagtaaatgctaaatagcctgatagaacacatcacaaaatatagtgaagaggcttattctttttcttgccccgcatgaatgatctgtgatgtaccaatggtttggccagaagaattcaatgctttcacctgaaaatatggcccaatcgaatgaacaagaatatctgtttcaaatccggttcggggagcatccgttcccacctcagacaatttgttaggtgctgtaccagctaacactttccaggctacagtttcagttgaaccgttccatgatgcataaacaatggctgcatcttcacataatggatttacagcaatactgggtggataaaacggcaagcctacccatttatccttaaacgccctataagaaagattttgaccaggaaactgcatatcatataacaaattcaacgaaggatcttttttattattaccagcactcctatattcagaaagatacggttcctgtccccatccaacgaattgatttccatttgatagtttctgaacatttccttgacttggaacatacagcgctggatcatgataataagttcgatctgcttttgcagtcatgttatggaaatcaagttgaaggattaaaccacgagcctctccctcaggcggagagcttgaagaagcac
